United States Patent Application Publication US 2015/0354009 A1 - sequence listing, part 8

SEQ ID NO: 195 - DNA, 741036 bp, Homo sapiens
ttttttttttttttttggtaccatagagttgctctgaaaacagaagatagagggagtctcggagctcgccatctccagcgatctctacattgggaaaaaacatggagtcagctccggcagcccccgaccccgccgccagcgagccaggcagcagcggcgcggacgcggccgccggctccagggagaccccgctgaaccaggaatccgcccgcaagagcgagccgcctgccccggtgcgcagacagagctattccagcaccagcagaggtaggaggctggagaggggctggggagggggcggcgggagcccgggcgcggagcggggggcggccgggagcgggcgcccggggcgcggggtccggcggccgcgcgcgagcctgcggcggcgccccgagcccggaggacccccctcccctcccccctccgccccccagaaatgttgcaaacttttgcagcccgttctcggcttgcgggagcagagtggggcgggggaggcggcgggaaggttgacagccggcgggctcacccccctggctttgatttttctgcaaacactggaggaaagctgcgttgcctcaattaaatacgctcccccaaaatacggagatgcggggagtgggggcccgggaaagaaacttttaaagcggcagtgtccttttaagaaggggcaaaaaaatctgtttatggccaccctccttccgctttaccttttctcctcttgacagtttcggccctggctgcccgagtcgggggtgtgttttcggtccctctcagatctgggcggggggcgggaggagtgagcgacctgggaagtcccgggggtggagagggggcgctccggggtctgggggcgacgtggacaccttctttggagcacggcggtgcgtttgggatttgaaggaagggccgaaggaagcggggtgcgggcgggcgagctgttcgccaagttgtctggcgggcgcggcgaggggagatgcgcaagtttgcagaccgggggttcggagcccggcgcccaggctggcggggggcgtgtgcgcgccaacgcgcagagggcggcggtcctgtggggcgctccacgcgcatccggagggagcgtctacaaaagcaagcaccgaaacttatttctgctctgggaatccttccctctcggaggttccaagcatttctgcaggaacctggggatggtcagtgcaagttgtatgctggttggatagtgcaagcaatgttttctcctcccctggcgatttttactcttcattttggtgtttggtctgtgtctgcgtgtgttgggggggatgggggggactcagttgctccctcctttcctaaagtgagctgttgaggaaagctcactctttcttgaaggtattggaacctgatgtgtgtttttctcgagagtgggggattatttatttgaatgcgcctggagtttgcaaagaacaggaggaagctacagctttaattactgttgtaaataatgtataaatcgcgcctgtcactccggaggaagcgtgctcgcgcgagccgcctggagctggggacggagaggatttctccagccccggcttgggtaccggcccagcgcgccccctcctcttgcactcggcttctggcggcggttggggagggctgggtagaggcgaatgggggccccaggaactgctcccttcctctcgatgttgtagttggaggtaggaatatggctgatcatgtgctggctgttttacagtatccccccccccaccttagccacaccccctgtccaggcgctttcccattcacggaattcgagtacagtaaaagccatcaggatgacacacgcgaaaaacatttaattaaaggcgatttccaaagggtgaccgcggcgaaccgcggtttcagcgggaggggggcggcgagggctgggacaaaagggaaggggatgagggctgggggcctggacctgccgctagctcggtgagtttgtgtgcggggagcttttggctgcaaagagtatatttagaccctgagacggtggatttggaatgcgagcgggttatgtaacagggttaatcagaaacactggagaaaatccccttcatgtgtttctggggctttttttttttttttggaatgggggggacatagtatttaggaagctgcactaatttttggtttgtgctgccacctttctccttcttgacccccccacaccctgtgttattaacatcttcaggtgtcattcttgccagaaggtgttcttgcaagcgatcagggtggcaggctgcagagccgactagcaaatccgtaacttgctgttcttgcaaattatgtaacgccggagcattcagtgccaccagcccccttaggctcagcaaaaaggggagaggggcatagtaggagtgggatacatcttgcacagctgacctgctgacccatatccccttccccccaccctctgcccccaccccaactcattctttgaaccagcccctgtctgtccctcctggaagatttaatgggaggggggtggtaaggcccaaacactcaactcacatcctgcacgcaggcactaggttatataacagtctgaatggaaaaaggaaggtcagagatggaggcatcctttagctaacacagcagtagtaatagcttccagaaattatgtgcatttgcagactttaacctcagatgtagcatctgctcctcaggggtaccaatctttatgtgtgtgagctagggagaaaaagagagaatgtgtaagtatgcctggtagttgagagtgatttgaaaatgggaaatgtttgggttttcagatgatgtaatggagttggcagaatatgcaagccggctcccagagtgtaagcagtaagaaaattggagctggcatccagtattaatgttgcataaattacaatatcggaaagaaattaacctacacactaggtgattatgccttttaaatacttaaaacataaaggcacacaactagaaaggaaaagcaaacatcatcaccttatgattagcattttcaacctccaggagggtggagtggagttcttggcattgggtgaaatgggaagctttctgatttgggagatactttccaaagggtagcaggtttagcttctacccagtcagtgtttgaagtccacagaaattgtggtctgaattctcatgacattgcagtgacctcatgagacattacctaggtagacttgaggctactgttgaattcctccctcttgggaatccaagtgtggatgcactgtgtacctttattgcctgagcttacaaaatcaggtgtgtgactttataatctgaaagacgaccttcccctgtccataaaactgctgggaatgttagcagttttaatgaaactcttccattttctaggtgatattaatgatagctggtgtcactcagttccatcttaacaacacaatgaaagagaaaaaagaaaggcaggaagcgacaagggaagtaggaatgaagcggaaaaaaaaccacagcgaatctttaatttaacaaggctttcagggacttcagggagccatgagcctcgtgacataactgttgttaaaaaccctttttcagaatctcgttattatatgtgcttgccagaagcttacatattttagttcagtgaagtcatccacacagggctgtgtaccaccacacagttggtttggaacaccagtgctgaaggttgaaggcttttagggccggcagacctaagggaaaaatcgaaaccaaaagatgggattaacagtgaaaagctcagttgggttgagatcgaaccccctggaagctcagcttagattgacttaaaatcagttaacagggcctgtagtttatgtgtagccctgaggacttctagaaccacatacgtctttgactttgaaagtgcgtggcctctcttgcccccttcagttttggctgattcactttctagtaggtgctcttacctagcaatttagcgccctttctagagattgattctcagatcaactttcctcacatggacccggctcgccacagtgaacaaatgatgccccatagtttgaaagagctgctgactgggagaaaagcctttgccagagggataaaataattattttttaaactaaaggactttaattttccggtaaattgctcataaaaacatttataataataccctttaaaaatgtaatataataattatagaaaaggcatttgatgatagttatgataaccttttctgttgcttcccccttatttcttaaaaaaaattgaattattaatctagaattcaagtcctgagtggttcaaaacatctataggagactcttctaatgttagtcacctgctggaattttccaatacctactggcatggtgaggagcccttggctttagaaaatgcctctacgtctgaaactgaagtatggagcctgcattgaagcccctaacgatgagacccttcagcttgttttcaaggtagcagaggtgggggctgtagcacacacttctggttccacactagactcctgaagtgggacacagggaggcgtgagaatgttaattgtaatagatgtgcctccggataaaaatgttctgaggatttttagtgacagctgaatcacttttggaagcaaactgccctctgtccagagctaacctttggaattcgagtgagacaagcccatgggttcttttccttggacatgtcacttctgaattaagatccaccttctcccatttttgtgtttaggagcttgcggtaccatgttgacaggagagatggagttggaggttattagaggttcatatggtatggtatcttaagcatgtgccatgtgttctgagtttactcttcctttcccccttcatcttcccaggctacttgatgaattgagcttcttagcttacacttctgtggaagccaaatgcataaccacatttcccaggtatctggggaaagagctgtaatgtgattgccatgtgtgcaaaaacaaataataaaaaaatttataggaaacgcacctctcctattatgacatatctggctgttcacattcattgtctcccatgagccaatatacagggactttgaggtagacctcatctgctcgctcacagattcctgtcccattcatcccagattagtgataaagtgtgcagaaacaaggagagtatttttgaaaggccttcaagtgttggagtgaatactcatccagaatttggaatacttttctgaatatgaagattatcttccttactcaaaatttaggaataatactctctgtctctcattttctcttctatcattttttagtggtttttttttttttgatatctaattcacgcaggaagtgttggtttagaaatgagctgttaaatttttcacccatctttttaggctgtatgttaaaataaaattgtatttttaaaattaatgctttaaaaaaaacctgagaatcagtgtttaagtgttgattaatacacagtaaaccatgatttttctctaagggtgccaggacattactgatgagttggtttttctgactaacagtagattaacccaaagtattttttgtcctttacttgttgaatacgttttctaaacgtactagtcccgtttcctactctagaaagaacactgagaatgtaattgaatctttctttgaggtttgagaatcttatggtgccacaaggtcactgttctgagtatgaattccaattgtacattatagaactgtaaatggacacagtgtcagagattggactaaatctatcttgatccccacttggaaattgttttctttctttctttttttgttaaatgctcaatatcagtatgttttgttatttcctcccttgttgtctaagttgcaagtagcaaaatagaaattcaattagttgattttagttaattgagatttttactttataggaatatttcatccagagcttaggctcttcttaattctttctttggagttaaagaggatgtaaagtcattttttttttttttttttttttgagacagagtcttcgctgtgtctcccaggctggagtgcagtggcacgatctcagctcagtacaacctctgcctcccgggttcaagcaattcttgtgcctcagcctcccagggaactgggactacaggtgcgcaccaccatgcccagctaattttttgtgttttagtagagacggggtttcaccatgttgcccaggctggtttcaaactcctgagcttagacaatccacccgcctcggcctcccaaagtgctaggattacaggtgtgaatcaccatgcctggcggtaaagtcattcttgaatattcaggaaggatattatattttcaagtaagttatttactgtattatgataacataagttttctcccatctaatggtagacagaaactccaggtagtcctaactcttacatagatatattgaaggggtatctttggcatgaggctcttaaatcctgaaagttaggaaactctagggttagaaggaataattccaagaatgtcaacaaagaacatttcgattgccccaaaggaaaccctctttccaagcacaggttgttttcactggacgaatatggaaagcatccctggaaccacaccatcagaagctgactttctcagggatgtcccacttgacttaatgatatagtctgcagttgtcttgtgattatctttgatattgtagtgttggaaattcagcttgggagtcctgatgttcttttgtgacagcccagttattattatttctctcttgattttggagcaaagacatcaaggagattgtctaaagaaatccttagaagagaggaatggggcatgatgaggaataaatgtaccatagctcacagtttagtcaggccggctttttgcgccagctcttacatgctaatgctaaaaggaattataggtaacaattcccctgtgttggtgcaagaacaatttttttttcctaacatatttgtatggccttaactgacacgtcattattacagactgtcttatcacattacatagtatggcacattaacagtggcatggcgctgtggtttcctggtgatggttttgtccgcagaactggggccctggtggtcagctagggagccctgtacagcacccactgacagctgagagtacaggtttcacacacccttgtaggtggtggaggactccaggctgccccaggtagagcttctataccatagatgttttctctgaaactctgtgtcagaggatggaaatgagtaggaaatattatggtacagaggatttataatctcctagcctagaatcatcttaacaatgttattgggtgttttaattttgattatgaactatttttttagtttttttttttttttcttaaagagatgggctcaaggga[450 bp omitted]gccacgagaataaaaattatagaatataaaatcgtctgacttttttgtataagcaaagaatgctaccaagaataaacaggcaagaatagaggtgaaatagaatgagggggaaatgagggaccatcgtttgaatctactatgaagtatggtaatcactgttttaagaattccagactattaactactgtgcagttaggaagggaattagttgtagccaaacaaaagccataaatatgaattttaggttgtacggaagaaatcctcttgatcccaaaacataaatgcatgtactgagaagccaagctgcacatggtgtaattttttctgtcttatcctgattaattgacagtcaactgtatgcttctttcctgaaggtgactttacaatctctagacccagacatttctctctgaagtggagtgaaggaaggagaaccagaagctaaagtgtgtttcactgggtgaagtattttgggggaaagataagaaggatgaaataggggaatggactagtgcctgcagagattaacaatgcctgtttggggctggggagtgggggctgtggatgaaggcagggagcctctagagggaaaagagacttctgtgcaaaggaaaatgacattagcattgactctgaaatggctgggaatgtgactttctaattttaaattatctttaacaagggcaatgaaaagaggaaaagttgacactttgagaagttatgacgaacttgtcgagaatgccaattgacaaaggcaggtaagggagtacttggaaaaacagcaagaataggtctgaagggcacggtgagctgctttcctagggtgtaaagggaattggcagccgtgtttattgactcttccaattaattttaaagaaacctgaagaaatggacaaagacagagaaaaggcaaccagatgtgattccgcccttccagaagcaaagaggcttatttcatcccatatgatcgatgccagtcatggggaggagtggctgtgtggaaattaatggattttcaacatccaatcacagaggacacacatgtatatttagcaagtctaaaacctcttaaataaactgcattgcttttcattttcactttccagttataaaaccagtggatgatgaaaaggccatgtgacaatacagcatgtactctcaggaatgtttgtgtgacggggatattatatctgaagggacagggcaactgggagggtgaactgctcataactctcaattgtccaggtaatgaagcattgggaaagcaaaggcaaatgaaataacctgatcatcaaaaaatgattcctcttttagtgctcttattagttgactgatgatgacaagtgtgaaattgccagagttgtattttaccatttctggcactcatcacgtgctttggatgagcacatgtgtgcagaaagtgggaacccgggcaatttctatagaccaggctgttaacctgcaagctgtaaaatttcacagtgtgaaggatgacagtcaaggattggtgaggttccctagcattcttgaggactcacagggaatcagaagaagaactgaagctacactgaaagggctcttgaaccctctaaagctgactttttagtcttgaacttggggttgtatgttaaatatgtgatactcactcatgatgctaccacttggtcgtattttattagactaaagtgtgttaaagccagaaagggctttatgaatcagcgagcctagcccaccctatttgaactgatgctgacaaaggtaacgtgttcgagatcacattcctagtaagcagcaagactgtgactagaacccaagtcttgtactttcttacctcatgttcctgtcacttgtgtgctgtgccaggatcctccaaagttcgaataatgaggatttttttttttttaaattttgagacggagtcttgctctgtcgcccaggctggagtgcagtggcgtgatgtctgctcactgcaagctccgcctcctgggttcacgccattctcctgcctcagcctcccgaatagctggaacaataggcgccagccaccgcgcccagatgatttttttgtatttttagtagagacagggtttcaccgtgttcgccaggttggtctcgatctcctgacctcgtgatcctcccgccttggcctcccaaagtgctgggattacaggcatgagccaccacacccagcctaatgaggctattaagatgtgtgcaagttgatctagcattaggcagtagattatgtacaaaattaagcatgggttattttggctatgcattattagtggaacattgtcagtaattgttattttttaaccccactgggcatttttattattaattaaaaatccaccagtgagcttgtggctatgtcagtaaagccattctaaaacatagtgaaaatagtgtccaagtctcatgctctgatttagtggaaagtaaaactatttttactttctattaataggtatagagttgagcatctcatgcttagtgctcaccagagctagacacagccaggaggcccacagcaaagatgtgtgtctccgcagcaagcttgttttctcaaagtagaggatttaaggctgtaccttgtctagagatgctcaggatcaagtctgtgaatggaatattatgtagccattaaaaatcatgttgcactagaaaagtatttcttatcaagaaaaagtgtctatcagccattgctaagtgaaaagtaacagctttcatagcagtgtgcatggaatgccatcttttttgtagaaggaaattgtgtgtgtgtgtgtgtgtgtgtgtgtgtgtgtgtgagttatattagtaaattaacttggacccacgaataccaaaatgatgaaatgataaagtggtcatctgtggatgctgggattacctgtgagtttctttttctttgtgcttttctgtattttttgaagttcttacattatgtatatgttacttttgtaattagaaaaaataaatcattttttcttccacaaaagactgtgtgttgtgaaacttgggatcctttgaaggaactgattctgaacttagtatgttacacagaacatctcagtgtttcaggatgggtcaagtttaccgggccaaagagaaataccacttgacaggcacatttagccggtaaaacaagggtcattcagcttgaatattacaggtcctaacactggaaccgcttgcctctcagggcgatatctttgagacattaataccgtgatccacaatgagaaaaacatattaattacattgtgaactagtacacacacacacacacacacacacacacacacaaacatttcatgtaaaatatttacccttcacttgtgatgcgtgattgtgtttgctctattatttaaaatacagattacgagccaccacattggtttcatgatctatttatgagccactcctcactatttgaaaaccttgtcctgggcatgaagtagaagcagcctttctgggggaccatggcccagcagtgggggaggaaggaagtgtttccacagtaactgatgttaagctccaggtgttactcattatgacttcagggaggaggagggggagggaaaataatgtaaatacttattatttataatcatacagtatctttatgccacttttagcacatgctcattaatatgctagtacatttagaggcacatctgcctagactggcttagaatataaattctgggatccctcttttgcttggagctgacatcagtgtgtaagagcccaagggtggcattctttcattcaacatatatttactgagtactttctatgtgctagggcctggggataaagcagcaaacaagagaggcgagctccctgcctttctggatcttatatttgagtggtggcatttctcttaagaagctcactgaaatacctgggtcacctcagaccaggcatttatggtggttctcttctaaatgtgttttgaacttggccttttcatctctctaccttgtatgtgccttcacctttcccctcctcctctgcctcacctagtccccatctctctctctgctcattgaaatcctaccatcattttcactccagataagatccaccttctccctcttgaagctcccagactcctgtttgttacagcagtcagtcatatgggccttgctcatttagtgaacatgtaacctcttcctctgccaggcctcttttacgctgtctgatagttattttccaggtatgagcctagtcttaaggagatcaagaccacagtttatgtttttactccatgcacgataccttgcataaaataggtgcccattaagcatgcagatactctcttccacattgtcctgcagaggtgtttgccttctcagtacaccagctaggcacttcccaactctgcaggcacatctcctgctgtcttatatttccaatggggccttcggtttggactcagctgcacttgtttgtgtgacttctgcctctcttgaatccactgatcccctcaattgcacgatcaggcctactctagtcttgagcaactcagaccaaagctggacgtgttgggagacaatatgtgtatgtggtttttacaagcctgctgggaggagtgagacagacctgggccaagacccaggtgtgtgctgtgctagccgtgtgaccttaggtaaattcattaatccctcagttcagctaccatgggctggatccaattaaaagaggacaaatcactgaaattcagccccatcagccacttgttgagctttcctgacgttacctcccatacctgtctggcttcttccttcccttttccctgtctccctgctcccactattcttgtactgccctctggctgccccatccaggcactgaggctggggttgctaccttattcccaccttgccctggtgctctcagagacttcacttttcaccaacccatcattccttgccctcccttccctttactcactttctcctttctgccaaaaaaaaaaatcacatcggagaagcttgtctgcaagggttccattcaacttgctgtacattaatgctccactatggtgacccactgctgagtctttcacttgtaatgtaatctaataatttacatgcactttgcaagcaatactctaaaagactcgcaacctgtttgaaattgctctgctgttacagtatttgagctgatgagagaacagcgtgagaaagagtagtttttggtaccacagtggtattaggtaaacccaggaaaataatgtcagcacaaggtgagggtgtgctgatggattataatatcctttcttagagaatcaattaaacttgcttagggtcttttatcgattttggcttataactggactaggataggtcaaagtattcaaggagtagaggcatagctggctaaaaatagtgaagcaagtatggaatcctgtctttctgagatggctgtgaaatgttttagttttgatatactgcatgacttttacagaattaattggcattgtgattaggttgttttatttcttcactcaaacatgttggaagccgattctaatatgcggtagtaatgaaaatagagtaatgctgtaataatagtgccattgtaaagtgaattacaccattaagcatctattttgtctaatttgtattgtggtagtgtgagtgatacacacacatgcagacgtagaggagctggtctttaagaaatagactctagctgagaagagaaaccccagtcctataatattgaacagtcagtgaacaaaaataattggttctgtgcaaagtgaatttatttatacatatacatatatatacacagccacatatataaatatacacacacatgcacacatacatattgtgtcaggcagatcaagaagatatatgactttggcataaaaaaatgcttggcttatgttgccttttaacaagttgattatgaatggggacacatattaattatgacaagtcaagtcaatgatggcatcaatgccaggctttgaaaacaaggctttctacgtttgtttcaacctcttcatccttattaccatgtctgagaacccctattaactggtatttctcaagttttggaaagaagtattaagggcccaggaatgatcattttattttgtcatttatctcctaaggaaggacatttgtcaaacaattttctttccacagcagaaagatagaggcacatttctatgccttaagtcacacatgaaccctaagagcagaaataggacctgagaaggcagtgtccaacatggctgctcccagtgggacaggtagatttaaaagtacaagaagggccaggcgcggtggctcacacctgtaatcccagcactttgggaggctgaggcgggcggatcacgaggtcatgagttcgagaccatcctggctaacacggtgaaaccccatatctacctaaaatacaaaaaaaaaaaaaaaaaaaaaaaaattagctgggcgtggtggcgggcgcctgtagtcccagctactcgggaggctgaggcaggagaatggcatgaacccaggaggcggagcttacagtgagccgagatcgtgccactgcactccagcctggggacacagcaagactccgtctcaaaaaaaaaaaaaaaaaaaagtccaagaaggtgttaaactttgatgacattccagtgacattatcccttcgcccacaagaggactggcttcaggggatagtttggcagtaattgtccaggagttttcaaccgttagggtggtatgggcagggaggtcctgaaaacttttacctggtccatctccagtctggattgctgcctccaaggccccctctctgcattctgccaccacagcatctagaaggggttatactgatggcctcccatctctcacctgcccccgcttttggattttgcttctgtggcattgccaacaccaccatctggtaatctagaacctcagaaagacttgtccatagagatgagattgtatgtagtttagaatacctttaactttcgtatatataatgcttgctctgatgatcaatatattgaaagcgaatttgcttcataagccactgttcactccctgtctttgaaatcaacaacgtaagttttaaaccccgcaaggatttaaggagatagtagacagtatcaatgcctggcatctgaattaagaatatatttagtggagaagttttaatacaaacctcaatgaaaaagcatcaatatcatattcagcctaataaaatgttttaatgaaaattgtcatggcgtttgacaacatctctttattaattggtcttttccattattattttcttagtagcaaacacactctggttttagctctcattagttatagtcctcattggattcacattttgcgacttcagctgtgtttatcttctcattggtctcagttccttgggagccaggttatagattgtcttcagtgttctgtcccatatctctctgccttttacatgagcattcggtgaatgccctcaggatgctagtgacgtgcagtttagaatcaatatgtgaaagatgagccagctgagggaggactgggatgaagcaagaaaatctattcctcgaaagtttcaaatgtttaagggcagtataatagaatatatcgcctccttgcattgatccatcaaatattcttgtgcacttactatgtgtcaggtcccatgttagtcaatggaacgacaaagctgaattaagtgaattgatgggcaagaaagacattactttaaaaagatgtagcatgctatagtagagatacttaggaaacctataacatagagaagaaggagaaaatgccccgagaggagttagggaaagctcactgaggtggttatgcctgcccgggttttagaaaaatgaggagattcttttggcaaaaagtgacagggcattccaggctgaggcacccaaggggagagttcatggcacattcaggtaacataagtgagatgtagcttggcctgagagtatgctggtgaggagtaggagataaggttggagaaagtaggcaggggcgagcctaagcatttcggaccttgtcttatagcaaaattttgaacaaatgaaaaatacctgatttctttttggtaaggtacttaaatatacttatgtggagttagggagggagacaaggaaccaagttaggagattctgtaataattctggtgactgatattgaaggccaagactggggtgagggttgggagtggaaggcgaagaagagttgactctgcggtaggattccccaggaagtggagttggaagaacatgatggagggaatggcaggagtcaagtgcagagtgtgggccgggattattggctgggacagtgtagtggagtagagtgtgaagaggagagaaggcatgggttcaatttgggatgggctgagttggaagttccagggacatatctgatgggcagcggggaatgggggtctagcagggagcaggtgacaatatgttacatgtggcattaggcaagaaaacaaaaaaatagcaatagcaagtatctggcacttaggagggccaggctagagagctggagtcctaactctgagcagcactcttgatagaggattagaaggtgaatttttacatctatgaggtgatgttcatggattttgaaatgatatcagcagaaaataaatctaaggtctaagtgggtgtggttgggaaattgaagggcttggattggtacgatgacaaagaaaagtctctcacaaaagtggattgggacttggagaccctacatctacataaggtgtaaaaaagtaagaatgggcctggcatggtggctcacgcctgtaatcccagcactttgggaggctgaggtgggtggatcacctgaggtcaggagttcaagaccaccctggccaatatggtgaaaccctttctctactaaaaatacaaaaattagccaggtgtgcacttgtaatcccagctacttgggaggctgaggcaggagaatcacccgaacctgggaggcagaggttgcagggagctgagattgcgccattgcactccagcctgggcgacagagtgagactccgtcccaaaaaataaataagtaaaaataaagtcagaacgtttgtaagcccagagtcaggttttagaccctttgctgtttcgggttgcatttcacttttctctgctttgatggtgctctcccaacatgcctaactgatgattgaagtgttgcagccttttttttttaaaacaaacaaacaaacaaccctttctacacagacagcattgagttgtcctgtctctaaaggcaatctgccccacacttggcagaaccttaagggtgggagaaatggaatgaatagtagctgtggataggtctccttattgccctgggaggaagacttcgtaggagaggaagttgaaagagggtcttgagaaagggggtgagatcttcaaaggctgggtctagccatgggaaactaagtgaaagaatttttttttaagttgatcaggaagagaaaaagaaatgcaccaagtgtttggccaggcggatgctgaccttggttatgactgggtgggattgccattgctgcaagttgatggcacttaacagttttctagggactttcacatacgcagcagcccctggaagtcctggaaggaggttgatgatgttgcagcccatcgagggaccagaaaaatgttgtgtaattatgaagacctgttgccttaaaacaattcggatccaaataggctgactttatcttcaactcaagtagtgtggcgggagggggctctgccctgttggaaaggcatccctctgccctctgtggccatcactgagctccctgttgttttcggtgagctctgactagatgttttccctgtcaatatttcactaatgtgtcatatgaattatttgtgttatctctgtgctgtgaaattagaggccttcacccacagtgtggtaagtagattaaaaggaaagcctgttttttatggtgtgggcgaaactgggaaaatatcagggaaatattttgtgtgtgtttgatctgacagtgggaaggccttgggatgccagtgtcttctaaaacctgaaagctgagctccggctggagttttcttcaaaggggtttatattttatctgttggcacttctgagcggaaggaaggtttggaatgggagattctgtgatgatcctttttttttttttttttttgctgttgttttcttctctgtctttttaactttgcagaaagcccttccagttatacactcagaccctgttcaggacgttggtggccaaacagtccccttttgttaagcgagcgtcccatttttgtttctcttgaaaggtgccctccaggacagcagagcctttctttgggctgtttataattgagccctgaagaaaaacagaaatcattctaaacccaggccaagtgcctccttggcctagctaggcaaagctaaactcacacaagatgaaatctaaccagctggttacctgagaaccaccttcgggagttctccggcttgactgctttcgccttggccaccatctcgagctccagcgacagctgagggtcagggcctctctgtgcagaagagtaggaagagaatcatagctgttggtgaaggttaggttgcattgtttgaaagggtcctatgtcagcttgcaaaatgctatggatctgtaagaatcctgaaagaaatgggttggagaagaaatttatgaccgtaagtctagttgtctttgagtggtgcaatttagccaggaatttttcctctttgcggctcaaggtttcaaaaagttcccttttaaaaaatgcgtgtgtatctatttttttcttagtttacataaaagggtattcatagctttagcccaccttgacatacttctgtcctttctctttttgcctttttctttacacaaattaggagtcatttgagaaaatgaggcatatataggatttgataagttagaggttgtgcagtttcgaattattttattttattctgttataataggtatgggggtaaccttcaggaatcgaaatggaatcttttttccctgttctcaaattatctagtttaggtcttagactcgccttattgcctataagtacagccttcagttttggaatttttctttccattttaggtatcagctgggtcatttagatggaataggaaacagtactgggcattgtcagagaaagactggctataaaagttctgatccctgtgggcagtttggagtcttcttaagtgtaagatcatcagtatacttcaattctgagcttctgcacatgctggttagtgaagctctgcccttccttgttaactgcacattttaacatctatgtttctagaggagacacctgcctcttgagggaaccctcagcatcccgggagcatctgtccaactggcccctgtacacacagagacctgaaaagtgaagcagtttcgagacaggcatcactttaaggctgaagtacattttagaaagttagggactggttctgtggcggggaagttgagctaaatatgcagttctattttaattttcactttatgccaaggcaaaagcattgggagatagactataaatgtataagtaagtcagtgcaagaatagccccttgcaaaatgcagatttagggaggctaaatattttctcacatactttaatgcacatgaataacccctgatcgagttcctgagaaagggatgttgtgtaaccatttgaccttgatcactgtaatgagttatacagaggtctgcacaactgtacaaaagtaaagtatttggctgtcttagttagctcaggctgctataacaaaacaccatcaactgggtggcttaaacaacagacatttattttctcacatttctagaggccccaccttctaataccatcacactgaggattagcgctttaacatgtaaattttatggggacacaaacattcatttcataacataggttgatgcctaaagcatactaataatttacagggtggttggtttgtctctaaaaagttaaaattttttagctttgtcatttgtttgtttcaacagagttgtattttcctatgtgtattttatcttaggcatggtcacctctcttcctattcctgtactgtttgaaatcacagtagtgaaacccaaggtaattaaggctggggtatcattgttttaaattagagtgtgtgaatttttttttttttttgtaattcaacaacaagttccttcatattgtgcataattggatcacattttaattttgtggcaaataaagatctattttacatttctattagaaagacaagcccctgtggcgagctctgaattaggatgttggccattagaagtactgaagcagtgaggcttttagagctgattcagcttctgaaaaactcatctgtgaatctttagggtaaggaaagaaccttcaatttaaagcttataaacagccatggattttacctaaaaacaaatactgagaagacaagaaaacgaaaaatataagtactaacgcaagcagagaataaccaaatcatgggttatccagtatgatatataccacaaaaacattctggtcattgaatcaggcacatctgtttgtgaggatattttattatctttatggttaatgccctgagtgtttatgtgaagcaaaataatgaagacaaattgtgaagaatacactggacaagtaaccaggaggcctcggttctgatcccagcccaccattaattatgtaagtggctctgggcaaatggctttcaccctgagacctcaccttctccttagtacagagaggcactgaactacagcttcctgccagctctgatattctataatcctgtgatttttaaaggaaccaccaaagaatatacttctttattcattccaactttaaaaaaattattattgaagcataatttacttaccattacattcacccatcttaagtatacaattcaataatttttagtaaatttatagagttgtacaaccaccaccacagtctagttcaacatttccatcagccccagaagatccacatgcccgtttgctgttactcctccttcctagccctagtctaagacagccattaatctgttttctctatatatagattttccttttctggacatttcatttaagtggaatcatatactatgtgttcttctgtgtctgcctcctttcacttagcattgtgttttgggggtttgtctatgtcataaaatggatcagtaccttggtcctttatgttgctgaataatcttccattatgtggatgtatcacattttgtttattcattcatcaactgatagactcctttctcttcctttcctacccttggagcgcttcccctcctcttgcctacccccatactgggaaaaaacaggtctctcttagagaaatgcgaggtctttatttcaggccttcccttgcagaagaggccggagctttgtgttttaaacccttccaagtcagtagattgagctggctgggtcattgaaaatgtgattaagcagctatgtagtaactatcagtaatgtgaaagcactagctgtaggtacttttccttgctatgtgattaatatgaatgtaaggtttctgcgttagggaacttgactcaagctttcccaatgacagcctgtttgttgttttgcatttattttacacattggatgaagtatttggaagcaagagttaaggacactggctgttaacctaacttagtaatgtcactttcaggatttttctctggaagtcatcagaattatcatgaacaataacaaacccacagagggaaacagcctcatactttgcttttcagctcggaatcacgaagactgccaaatgtaattgtgatgaaaaggtagatgtgatgagaagaggactgagctaagtcttggggctgttgatttctttaaagagaaaccatagagaagacaactctaatgtattaatgtgtgttgttcttttcatgttgtgagtgaaaccacgatgtgcacttccatttgctgagcttctagctaatggagggtagcaagtcagtattctggatgctcctcaaatgattctctcatttaaaacctagctctggaaatgtggttaatctgtagtatgttttgagcctcagctgttcttaggtccatttaacttcctggaatccatccttggctagcacgtcctgtaggatgaaggagaaagtctattccatttgcctttctcatcttcacatgtgtggtaaatatgttttgtaggctttctctattataaatttcagaaaggttgggcccaacaagtagtatgtgtgtgtgtgcatgtgtgtatatatgcatgtgtgtgtgtgtatatatgtatacatatgtgtctatatgcatacatatatatatatacacacacgtatacacagacacatattcttctaactgcatagtgggatgaggcctacgaaagccagcagcttgcctcagttttatttagcatgctaattataaacagtatcagtaatatcttttggaatttaggcgttagactgttcccactggtggaagtgatcctttagagcatcacaccctgcctcttgggtcctgcgaaagctttgcctttgttgaatccatatggtaggattcttgtggagaaagataagccaggccattgtttagtaaacatcagaccctcccgtgtgctgagcctgagatctggcaactgggcagagagggctgctgagggctgtgtgctgccgggctggaggatgagcaaactgcatccaggtgtgatcacatccttatccttttctcccacagctttaaagtggtgaaatttttcttctctccatcgggaaggaaataggaaaaaaatgccatatcttgtttggtggtcggggtgaagggcgggatggtcagcatcctcttttatttgggcctatattatggtattatcatagttgattattgctaggatgatttatgtaggagtctctggctaagttatgagatccttgagaacagggatgtcgtggggttgtccacgtgtttcccagggtttttaacacagtgctttgcatacagcaagtcctcagctattgttttataagtagctgatgaataaatactttccattcaacaaacagtatttgtgaatatgctagtgttcacaataatgcctgacgcttgctgggtggccatgatatagaaataagaatttcttccttcctctctccctcccttccttctgcaataatcagttcttatattcaccaggcactgcactaggggctgaggttacaaagattaaataaagtattatctgcatcctcaatgagttaataagaatgttatcctagagttcggtatgtgatgtgatagtggttcacaatagttaggagctcttattgatagcttaatctgctctaggttctgaacacactgggctcagtccttaaaattctcactgcgtctttaggaagcaagaattatgaaccccatgttgcagattagaggaccgaggcctagaagagttgctgagtctgagtccagaaggttgctctcgaccatggctcgtgcctcctaccataccaccaaccccaggtccccatccccttcccctgactgcattaaatgtgtctccgtaacagccccagcaccctggcttcccttttcatctgtgtgtgtgcccttctccatgtgtggaggtgggaggtagcaagcagcctaagcaaatggagctccttggagttgtgcagtgttcagccaagtcagctgaccacagctgcccctagagattgtttttctactttctcttgccctctggctgttcctgtgccagctccttcactcttctggttgcaggttttcctttcattccttaggtatcctgttgcccttcctaggcctgagacggatgtgctagagaactccgtgagattttactctcttcctcactgtcttagctgacttccggctgactagacaaagcgaaactctgatcttgctggaggaattcctgcgtgcaatcctgacaagtaactttaaccaattgttgagaacaacctgcgactgtggcttggcagaggcgtgtgctgtgtactgtgaatacgaaagatgcagagtttatgacacggcaggacccttgaacgcaaggtggacatatcctcagaattgccccccaccctcgccagctctaccggtgctttgcagctctaacaagagctgctaacagagaagttgctgaagttggcattggctgaggaatggctttattcagccaggctctgtgggcttgctgcccctttctggatgctgtccacacaagaaaagccataattattaccatggactcttctctggctcactgcttttataagaaggggaaaaaactcaaacttcagaagagttagaaagccttgtctgggcccacatatgacacgttgatattttggggcaggatttggcccagcgtaggccaaacacgagaacagcaatggtgccgaccagcacattgaagtttttagattgaaaagcctgaacagaatgttcggctggagctggggacatattcctttcctattttatctcttccataagcctcagggctgattggaaaatacacccactgcaggatttggatagccaggattttatgtttatttcttagacctgttcacgcacagtctcaatttctcttgctcgctctctcttgcgcatactttttgggtggaagtctgaaagctgcatgtcataataccagtgaggaagtgctcttttcccttatggaacagtgctcacttttctgacatggacactgggaccaaagtggatttttggaaatgcaaatctcatatctcatgttcttgcttaaaaccctacattggattccggttgctcatagaatataattcaaaccctctaacctggcctcaggtgtcccctgtccagccttccagactcatctttcatctgtccttcccctactcacatacgtgctcgcctttgtagccatactgaactttggtcctccaacatgctctgcattctcacctccatgtgctttcccttatacctgtgttgatttatctgctctgatttatccactcattgattgccattacaatcgatttatccactcattcatttaataagcatttatgcagcacctcctaagtgccagttactgttctgaatcctggggatacattcgtgtgaagacagacgagggtcctgctgtcatggagttcacagtcctcacttgctaattcccacccatctggtgagtctcagcttggatctccctcttccaagaagctatccttgacttctctcctctggatttgacatcattcctttgccctctagagcacctgtattttctgcattacagcgctcacaactcacctgaattcacagtgttgagctccttgaaagcagaaacgttccttgcccaggctggcacatagtgggtactcagtctgttgaaggaatgaaggaaggatgcatttgacactaagcagcctcagtgaaaaaataggtactctctgcaaacattttgaacaaaactcattctccacattgtcaacggcttggcagtggcctttgaccagtaggaggcatctaatgttgcggatgataagtttgctgtcagtcatattgttgttcctttgcaggtaatttgtcttcctggttgcttttaagattttctctttctttggtgttctgcagggtcactatgatatgtttaagcatggatctatttatttattctgctcaagacttgtgcttgttcattgtgaagactcatgttttcctttaattctagaatgttcgtggacacttttgtcttttcttaatctttttttctgaagcttctgttggatatatgagtgatctactcattttatcccgtttcacttcttttatatcttttatctccttttctgtctgtctcatgtttcaggcagtttccttggttctttcagaatggttcactcattctatctactctgctgtttaaactgcctattgaaattcctaaatggtagtttaatatacatgaagtgatgatggttttacatgggaaaacactcatgaaaccatcactcagatcaagacagagaacatttctagctcccctgaaagcccctctgaggcaatatcctcccaaagctagatgcttttctgtcttccatcatcatagattagttttgcctcttattgaatttcacataaatggaaacatgccaaatgtgttcttttgtgtcatgtcctttgtgtaattttaagtgactatgtttgtctgtcctttctagaattttttaaaacttgcctattttttggtcatagtattctgttccttcattatgttttctatatcttcttctttaaaacttcttaaaaatattcagacttgcttgttttatattaatactagtcaattatgtcaagtacttaaggtatactaatttctgttatttgtatcttacgtatagtgaacttgttccttatatgattgtaatttttgactgtaaaatcatcttcagcagaaattatttttctcactgagtactgtgtttcttgggttgtacaagtgtctctatcctgcaacacagggtagtggaaattcagagcctaaatacgtttgcatattccataggtttaggatttcagcttctcatatgggcctacttttttttgtttgtttgtttgtttttgttttttctacctggaattccaggtagatggcaagttccttttttacttccttgggcaaggggtagagtttttctagtctttcttacatgaaggggtttgtttttcaagggtactcttaaaataggcatctgaattctagcttctggccaagcgaggctgcaagatctcatctcctgctcctatgaggttgttagcaccacaggccctaccctcctagggtatgtgtagatgaaggtgagtgcccctgacccaggccagcattgcatcatctgtacgtttcttcttattctttttgctttgattctagcctctgtgttccactctaagtttttgcatctggtaagtttgtgtaaaaggttattgaggcccagacctactgaatttaaacctctagaagaaggacccaaaaaccttatgtttttaagaaatgctgcaggtaactattaagatcaagtagggttgggccgggagcagtgtctcatgcctgtaatcccagcactgtgggaggctgaggcaggcggatcacgaggccaggagtttgagaccagcctgatgaacatggtgaaaccccatctctactaaaaatacaaaaaaaaattagctgggcatggtggtgcgcacctgtaatcccagcaacttgggaggctaaggcaggagaatcgcttgaacctgggaggcggaggttgcaataagctgagatcgcaccactgcactccagcctcggcaacagagtgagactccgtctcaaaaaaaaaaaaaaaagatcaagcagggttgataaatattaaaagtttgagaaatagaaatatcatattacatatatagatattacatcgaatctaatagtcagttcgatttcgcttgtaatgttatgaggaactaatttgttctttgtgttttccattatcttacctctaatatcatacccttgcaaaagtaagcatggaaatgtctaatctggatattcaggaaaaaatgtattggtctcattctattttgagttaaattaatctttcctaacctatggttggagaaggccctatgagacagtgtttcactggtttctgtctctgtgtttcatcagaaaaatagtgataaccaagtggtgtgaaaacttctgaagaacaatagaaaaaaaattactaagcactttagttaattcagaaatatttcctggaaaaatttgagttaatgtgcaatgtttgaaaaaccttgtgcagttaagtgcccacgagactgaatctgactcgaggcaaatcacccaattactgtcagggaatgaaatcatgtttacagagaaaccttcagactctcctcctgtttcatatcttcacctgtttttgcttagagcatgattgtgttgcttttgggacctggttccaggtttatgtcttagtggtttgtttgacctgactcccctaacccaggcctctccaacaaatggctaccttgggatacaagaaactgcgtgtaattctttccctttattttgagtgaggagcaggttcatgggtgtgccagcaaatgcacagagactttgacattcacagcatttgataagattggtcagcctggcctgactttgcttgggtacctgggactgtgaacagctagctacccattctttgggtttgtgtgtggagcttccaagaaatgccttaactttccaaataaaaacctgaatataattcaaaggatggcatgaaagataataattgttgtgcagcctaatttaggaaaagtcatttatttgccactctgttgctgtggaaaaatatgtagtcttctgcatttgttaaaacaagtcggcttccgctttctggtctcaaaacacactttgcatttttttttccctgggaccgtcaatttaattcaggaatgatctaattatgagaaagtgaatccagtcctctggatgataagtgttgactaccctgggagaagccctggcagatggttagttcagagtgaatctaccttgggattggggcattagactgacagcttttttcactcaattaagtgcaacaactgccaaaaggacagcattgaacttgatgcaaatcacggccgtctccgatgttgataaagtttaagcctgtgccctcctgagtcagccaaacttcttagagtgtttcaaggtgccacaattgtgaacaaaaccccaaacctagtgaggcacagggaagactaggagagccctcctttaaaatgtaggtatttatttccttttccaggtcagttgctttatttagggcctctattttggtgtcttgtctgtcagtgattcatttggtatctcctgcagtttgcttttgctctgggccccgatggatcctgcggtgactctatgttccagaaagttaatttattgcccttttatttggggtacaacatgacaccactctgcatgcctttgcctgccctggatggcctctcaacaccctgaaaggcagggtccaaaaaggagcgagagcttctcagtgtgcctgcacgtccctactcgtgaagccccatatagctttctaggccattcctcagaaagtcagttgatgccagaaacgaagcagaatgactcttttcccgactctcctgtcaaggtggagctctgatagaccccagtccttaccacaactttgatttctctgtgtctctttctgttccccaaggagtttcctcatgtcacccctgacttactgctctaattctgtgttgaccaaggtcaggacccattaagatgtttctgaagagtgtaacaagaaagggcaccctgcaaaacaaggtcttggagaagggtccttgagacagactcttgcttcacctgtcccaggcctttctcaccctccacccttcacccaggtgtatcccagtccccgacagcacggcacagctcgttctgtgttgttatttctgttttacaagcctggggaatcctgaaattcctcagtcaggtatatgccattgtcagcctgttatcagtttcctgatttactgtgtaagcagttttgataatccttgtcatatgtgattacatttcccccccttcccataacatctcagtgtaattggtttgataaactagacctcagtccagtagtttgcttgcaatatattttcaccttctatctgtgtgactaagatggttttgaatggctttgcatggagaaaatcaggctttgagcaccaggtccttagtttcggaaacaaatcacccagggcaggcagcacaggtctgggagagctgggaatcccagttaagcctcaggagtcaaaacgggatttttctttctttccctgcttgggccgagagtagtgtgtgtttctttgtgtgggttttttgggatacagagaatatttatcttgtacatctgtatctgattcctggggccattggactaacttcttgtccataaaaaattggattcgttcgtgtattcatttattgaatatctgctttgttccaggagtccatgaggaaaagaagctttatttttttctcatttttttttccctttctttcctgcccctattggcactgctcccgagagcagagaaggaataatcagtatgctttgaaaatgaggcatttttggtaaattaagcatttgggttaatttagggttaaattaaaatgcaaaagctacttggggccatcacttgctaacttttctttgtctgataattcagcacctaacagagttctaaggcttcgcagagaaggcagttttagaattgagatgggaagaatgaataagatttagaaaaggagagatgggctagcaggtggtgagagaagggccttcctgctcctaggagggaagagcctcagcaaaggcaggaaggctggaaagcctgggtaaggagaatggacagggctgctggcgggtgagtgaaagaaggaggagttaagggaaatcataggaattagtatggagagtaagcctcttgattactgggctctggaatttgaatttaagtttacaggcagtcgggagccctctgaggtttttgagttgggggtggcatcagctgaactacacttccagaaaataaataggtatcagtatatatagtagttgtctttttttttttttttgagagaatataatgcaggccaaagctttatctctactcaaataaataattatttcaaagaaatatcgttttagaattgaacatttttgggtaatacttctttccaggacatgaattttcctacagtcgtccttgaaaatttctgttcagtctagtttcaaaggatggaagctgcgtaccttttgttggcatatcctcctagtacaattctgcggctggtattgctcattcccgaacatccatgatgagaatgtttagcaaatgcagatgtggatatgacaaagatgagaatgtgggtaaatcatcagcactcaagtctcctagatctaggttatcttcctagatctaaatttaaagtgggattggaagatgttacaatggtttattttacacgagccagacccactcttttaaaagaacctggctgtctgcttatacctagactgctgctctctttatttaacattttggtattttgctcatcatggattgtttgcatccatatcaatttttttaaatttgcactaaaatgttatttatctagatggctgagttgtttgggatccccttaaatcctgcgcctgagatgagcgtctcacttgcttcctctagtctggccctgttgcgtttataaaacagagtggaaaatctttcaaatgctctgagtcatttgagcatctcttcgagtctactcacatccttgtggaatatgtccctgataccacacaaaacaagcagcagccaaagcagtaccactctccagcctcccttgaaccccctgggagggatcttcccttcagcgtgtggtggtgggctcttccctggttataccctctccctaaggcattgagatgtgcatggagagacacctgagaagtgggaacctcctcgttgtgcttgacttcaccaggtctttttggatgggatccaggacaaacctgtttcgtaatgagttcgtctgggtaggaggtaggaggattggaaacatggcccatgggattgatattttttgacatcttgacggttcccagtgaatgtccttctctcagcctcacctgacggagcccggtttagaatgagaggttacctacagagttattccttgtctgtagtgaatatagatctgccaatgaaaccagagggagaaatgagagatttggaagggaccaccagagagttaaccctcatcccttattttccatctggcaaacctgaggtgcaggaagatggatgggctcctcgtgagccacatgaccggcggtgcttagaactcaggccgcggttcggctcttggcaggcttctccacaccatgggaacgggggagcccttgcctggagacgggatccactttgttctccctgtaaggcaacctgttattaaagtctccccctgattctgggtttcagtgcctttctttccaaactacattaggccccctaagtgcctttattgccatgtagggagagggaaaatgcagacagctttgtaattgaacaaccatgctcttgtcagtagtcattgttttcaaaccagctattacagggggctaaggcccgggtgtggcaccgggaagtaacgctggccttctgcaccttgctgcctgaacagctccctcatcggctttcccctgtggtccctggggcaatatgtctttaaatttttgttgtttcctaagttctgctctggcaagcaagctctgccttaaacctgcagagttaaatttacccagactgacaactgtatatgcagggtttagttacataacagcagttgctgcttttcacatcatgctaatccaaacacggtgctcaaagagatcaggaaaaagcagccctccgtttgatgcgctgcacgggtgactggattatgtgtcttaaaatttttttaaaacactgtaacaattattccattattctgactttggtgccattaggtgactttttaaatatcttaattattaggtaagcagatgctctgtgcacatgtgcaatttgttaatttatgctgtttgaaatgaaatccagttgtttgagacatatttcataatattatggctaactgagtcgtagtgctactggaattacaaagctgctagcagggaaagcgtgtgcgttagcctcatgtactctctgagaatcacgcaagtgctgcttgtgcagcttctcagtgcctcctgtctcctcagtttccttctgagaagatcattagatctttgcaacctgtaatgggcttgtgaggccaggcacaggaccttcagaactgctggaatgctggagaaggaggcttttccatccctaaatagtcctggcttatcaggtaaactgctgagctgctaagttgtcacacggactcagggggtctgaggattggtgatgcaagctactggttgatgatagtctgatattgcagctattcagcataagctgctacccagctcttcaagttacccctaaatatttattgagtagttactgcctgcaatattggatagatgtgatataatggggcaaaattacgtaacttttggggtcagatctggatttgaattgtgacccttggtttactattaggttggtgcaaaagcaattgtgggttttgctactaaaatagcagtgaggccttaggggccaagtcattttgtctctttaaggctcaatttctgcaaaaggaatagacatatctgtcaagtaggcttattgatcaagattataaaatgaccaacattgtgcttttcacgtacatattaggtgctcagtaagtggtcagacatttcgtcccttttgacactcgtgggatgtggcctcaggagcttaccatctagatgaagaggcaaagtgtcagtaggccctgagttaaataaaggcacagagtaatacgagaaatgtcacaaataggctgtgactcattgactagtgagtggtatagacctaaaattcagtgagttcaaaggagaagatagatcactaggtaagcttcttataaatgtggatctgaccagttttggaaggatgaaaatttggacaggtggaaagactgctgggggttgtgtgtggagaaggccggcaactgcttatcaatggggtcaatagtagggtcaaagcacagagatgaagaggctgaggtccatgtggaaaacaatgagaatatgcatttgttctgggagtcatggtttgtgtgtaatacatagtgggattgattagaactgtagatcggaacccctctgtggagaactgtgaatgccaggttaaggaaatccttgccgtatctagtgtggtttggtttgttgaagcatggagctctggctagacctgcagacctctgggaagagcgaacccatgaatgtggagtagacctctagtggctgagagagttactgcaacccttaatggtatgaatcttgtttaatgcataactttcacgagcttggctgcactgtattatatattggaagctgaatgtaagtaacatccatcctgacagcagtaacagctgacaacctaaaatcttacagagtcagaagaactacagaatgcattttttaaaaagaccggggctattttgggataaggtaaatccacctgtatacctctttagatcctaaagacatcactgtgtcacaaaaaaatcataattggtgatgttgaaataacaacattaacaatattattattattaacaacaacagcaactaaagggcttttttttttgttctggtgctatattaatcattttacttgcattgacttaattctcacagcacttcaatgagaatggtactgcaattatctctatattacaaggtgaaaacgccagcttagaaaggttaattaacttgcccaaggtcacacgattggaaaattatatgactggaatacaaacccaggccgtgtggctctacctgtgttttagaaatcctctataccacctaataacctccaagccttaggccatgatgaaataaggttcaggaagcccttttactgccacgctgaaatgtacaatgttgcattcaaaaatatgaaccgtgaaaaaatagacaaatggccattgtctatggaatgatgtatgtggaatactgccttctccaccaatatggtcgaagtgaggaagtgttacagctttttttttttttcctcctaggctggagtgcagtggcacagtcttagctcactgcaacctcgacctcccgggttcaagcgattctcctgcctcagcctcccgagtagctgggattacaggcatgcaccaccactacgcccggctaatttttttgtatttttagtagagacagggtttcaacaagttggccaggctcgtctcaaactcctgacctcatgatcctcctgcctctgcctcccaaagtgctgggattacaggcatgagccaccgcgcccggcctgtgttacagattttaagtaaaaataagaaatatgtgatggcttgttcctactcttggcttgcaccccatgtgcattttctttcttctctgggaacttggaagggcacaagttcaaatgtctctgaaaggcattcagtttaccttctgctctagaacttgaagcaatttcattagtgctatcgttgattcacgttggacttcgtgcgcttcccacgggccattcgttatcagtcttggccctgctgcaagagagagtgaagggcatctagaggtgccattggtaaaagcatactccccagggctataggaaattactgtggagctgcttccaactacagcaattcttgaaaaaggggccgcgttaagagcaacaacccttcctacgtgcccctggagccatccgctaaggttagtgtctcaaggtggcatatggtggaaatgcattaagctgggactggtgacacttgacactgtcactattcgtgtgaccttgagaaaatgattgagcctctctgggtctcaatttccacaactgtaaaattacagaattgttaggatattgcatatgtaaagcaattaacatgatgtttcttcataagcaaatggagctgctattattattattggtattggtcatagctcttttgagttcaaatgagaaaaacagactcaaactatcttaagtaaagatgagaattaatgggctcatataactagaaagtttaaggaggagatcaaacttcaggaagggctggatccagggagtcaaagtgttcctgtgttggcttttctctattcacaggcagttcctctacagcaagagacctaagggaaaaagtctaactttttctataatgaatccttaaaaaaatactcactagcttaggctggttcatgtgacacctccttctccaccctgcagcagtataactttgtgcagggctgggatgtagtacacccagtggtaggactgggtcttgtgcctattcttgtggaacacatatagattctaaaaatatattattgttttatgaaagtatagaatttagataggctaagctttgctgaagacagaagtacaagtatttcaggatggtagaaacaaagtgtgaggggtaggaattggcatcatgtgttcggggataagtaaaatgacgtatatttggaatagatggttcctattgggagtttgaaagatataggagagagaataggggctggtgagggcgttgattgttgggctagagtttcattgttattcacttgataacagagagtcgttgaaggtttcgtgccaaggagttataagataataggaatagcaacaactagtatgtgcaaacactgttctgttgaccaatcactgccataggtaccttgtctgtttgacctcacaacagccctgtaaggcaagtgttagctccgtttcacagattagaaaatgtagactgagatgttaagggtctcactggaactctctgacaaccagagtctcagagctgggaggtgaactcaagtctctaggaaacaaatcacatactcagtgaggagcatggtaggttgggatgtgtactggtagcagtgtgcattataatctattccataaatcattattcattgctaaccaagggaaagcaatagactcactcactgcctgactggctttgggtctcagggcagtgtagaccacagtgaattgtggcagacactgtctttggggtgcttcctggtagatgaggcagagcccagtgctgagctgcagagaggtcctcagttactgagcactgtaccccttattttgtagcaggtatgtcattgttggtgaatggggtacctgggtcttgggtgcggatggtagatattgtcatcttttactgattgtatagatttttcctctactctgggtagagtatgctggatcccttgtagcctggttaggaaactggcaatccagagtaatttgcctttaggcataagccagtacaacatgtcacttttaaaataaaacacattaatttacagaatgactattttatagcgaagagcagcctgtctaaatgagaggaattaaaggccaatggtcaagtcctccgcattattcacaccacccttctcaataaatcacaattgctgaaactgcaggttggcacttacttaaatagcaccgtgttggttaagggtgacatgtgctgacacgacctctgtttgcatgcaacatgctctatggagagctaccgcctaaaatctacacgtagctctgtcaacccaagtaccttgtgcaccattaagcaaggtttagattaagcctggacagcagttgtatcttcattctaggcaggcttttcttagagaagcgaagcttgaatggcaatagtatttgacattcagacctatcccactctacagacctaatttttaaatattcctgttattttataaaccatcagattttcagaacagatgcgagactacagaatgtgaggacacagaatcataaatgagcccattggtaccttgggtcttgctgaagcttccttgatggacagagttgtccttggattactatgtgtgctgcgtctgcatgagtaccactttactgttcttattgtttgggaagggagaaccaataagcagtcagtgtctcaattccattggaaggaacgatagaggggaagatgaatattttaaaggttggcaatgtgtttatctgcaaagcactgggcttgactaaaatggttttgacacagcctaagaagtacaatagccagccttgtggtgtcctgggacacatctaaatgaatgaggaaggggctggttgtgtggtggtgtcatcttcccatttcacatttcactctcaactattagatgtgcccttgatcagaactgatttctttcttttttttttttttttgctacaaggagatggcagcctaggtgtgctttcctttaaaaaatgtcagcttgtgaaataataatacagatgacaattcctgagtgtgtactctgccaagagttgtaccagaggcttcatgtgtagtgtttccattccgcatgatgatggtgcaaggaaagtgcagctattcctatctttagatgaggaaacagaggttcagagctttgcccaaatccgtaacggtggagccagcctttcaatacaaatctcttctgttttaaagactatgttgtttccactatataatgctgcttcccacatggaaatgtgaatgtatgaaaaatctccctgatgcatttagtatttttttttttggaccatttcctctcagctgaaaggctaaaaatcagcttacgagctactaacgatcagtaaggtgtttgtgttttgtttagtttttaaggaaagccagtgggaaaatgagattcatatatataagcaaaagcatttatactttatataaatatatataaaaccatacacacacacacatacatgcaagcattctgtaatatacccactgggtgatatgtcagttctcctttgaattctttttttcttttcttttctttttttgagacagagtcttactctgttactcaggctggagtgcagtggtgccattttggctcactgcagcttctgcctcccaggctcaagagatcctccttacctgagcctcccttagcctcccatagcctcccttagactcccattgtattttttgtagagatggggtttcgcaatgttgcccaggctggtctcaaactcctgggctcaagcgatttgcccaccttgccctcccaaagtgctggagttattggcctgagccacccaccatgcccagcgtcctttgaactctttatgtaatctatctcatgattttattttttaggaaagcatcttctgatatttaaaggtaggcctcactttatgcaggacatatatcactttagtttctatgcaacatcatgctttccatgcaccgtgtaaaacaatcaattttatagaacttattggtgtcccttttgttaataggaaaatgccccttgtaaagtcaggttttatttttgtgtgtgtttcctaattttagctctgagcacactgatgttcttacagcaagacacactgattttttttttttctggaccaaatactaattgacggagaaaagtaatttttattgataagcatgagaattagcctcaccaggcttttggagtttgaggaacagataaactttaaaagatataatgagcttcacttcaggccaatagatataaatctcatttattctttttattaaaaattgcaaaatttcacctggtgtagacatgtattaatttattcatccctattgacaaacatgtaggttgtttgcagtttggtattgttttttttccatgataaataatgctggaataatgatggatatctgtggttttttttttttttttttttttttttgagacagagtctcgctctgtcacccaggctggagtgcggtggtgcaatctcggctcactgcaagctccgcctcctgggttcatgccattctcctgcctcagcctcctgagcagctgggacaacaggtgcccgccaccattcctggctaattttttgtatttttagtagagatggggtttcaccgtgttagccaggatggtcttgatctcctgacctcgtgatctgcctacctcggcctcccaaaattttgggattacaggtgtgagccaccacacctggccagatatctgttctgtcttcagcacctggggccctgtggaggctgcagccctccttcttgctgggatattgacattgtgctggccccacagggctccttctccagccatcctttgaatcatctactgcagagcagctaggaggtgggaaaccagatagacaggctggagaagatcctctcaaaaacaagagcccatagctgccgagtgggagccagcaaatagagtgcgtggatacaggcactggatgttatttatgtctttctcctttgtcgttctccattattttaccattaaccttaagaaggcaaagatcatctcatgttcatttttaaatcttttataatgtctatcatgaatgtaaaaatgcgtttattcaagggacatttaaggactgtgttaaacactaaggggtcaaagatgaagaagacatggcttttaggctcgtgggttgctgtttcttacctggcaactcagcaagagaagcaggggctccttgctcttgcatcccccttgctcttattttctttccccagtgctgtgtattttttcatactgttctagaaaatctgagagtgggttggtaatgcccttggttctgatgagcttacacaattttttcttcctcggtgagtacttgcaatattagttcttaatattgaaagtgggggtaaggctttttcaccctgaccttggtcactcgtaggttaggagatgatgttctacttcattaaaagtgtgttgagctccttgagggaatctcttaggaaacatgtgacgttagacgtttttgagacccctctttgctatcaaaggaagaagaggaccagtggggccacttttatcacctgccctctctccattgtggacccatgttttgaaagactttgatcatccagctgtattttgattttttaattatttatttaaattattatttttaaatcattaatgattatttcctagttgttactcagacaatgtgaggtaggtgctcttaaaacaggtggcccatatggttccagccaagagatccgggttagcctgtgctgttgtgatgaagacagttgcacgttttccattagaatttttaaaatattccctccagttttgcagaactcactggtacctgggttcttagattgggcactgctgccccagaataagggtcagcaaactaggccccgttggtgggtcaaacccggcccacccacagcctggttttgtaaataaagttttattcgaacacagccacacctacttgttgacacattgcctgggtctgctttggggccacaatggcagagttgagtagttgccacagagaccttttggcccgcaaagacgattcactttctgaccttttgcagagtttccctatccccactcccatctagaggaaggtggccctgaggtgtgtcgggtggggaaacctctttgaagcccagacagcttggggttgggtcattgggtatttcgggggaacgacagggaatatgccagctgctaaaagaaaagctgtggtgagagcaacatcactcaaagcctgtcgggatcttctgtcttgtggggcagaggaagaaggcctggcaggtctgaggcagggagttcaggggtgtgttaggggagggttgagggagaggatgttggggaacttctttaaatttctgccttaggaatttctggtgcagaaagaaggagaaacattaacaaagtgaggcactgggcagttctgtcttctcccttacaaaacgttcttcagagcccccagggtgcttctggggaagccaccagacacgcagcagctcttgccaacagtgcgggcttgtcaactttttctttcccttttatgcctgtggtgataaacatatgctttgaagcatgagatttgattttcctgtcttaacgcttataaatacaaatgtgattaatggtcataaaaaactggttgacagtgtaagactaattctcagcaaagtagccctgcgctgttccctgtggaagaggctgttatgcagaggccgtgttgaacagcgtgaataacacgggcccacttcccatccctaccgccacccctcctcctcctcttggtttttccctcagatctccctatcctccccctggaggctcttcctccttgataattaaaattggtggattttcctctcgagagctacctgaggtaaggatccgagtctctttgtcatgccattaatagtccggaactctgcagaaaggcatctggctgccttctccgttccccacttgggcctggcgggccgcctgtacatgttggggaacaacacaacctaaatctggacaatttgtattttagtagtaacggggatattctctgtctccctctgtcattttgcattaaggacctgccactaataaaactaattaataactgctggctcgatgtggaatagttggacttcttaaacctggcagcctgccaccgccgcttttgaaagaagcacttcatctttgtcatggacaggatgaatatttctccacacttctaattggacaaagtgcctttcaaactcactggcatttcagagagagcagataagtagtccgtgtgctctccagatacaatcacctctcagctgcctccaagattgggagccatttcccaagagaagccagcacagagggctctgaactttttcttctttagtgactcctcctgattttacctctgacctctgactccagacagagtgagcccgaagggcaagcagggcactggagctcaccaaacccacagtaggaaggagtagttttcatgtttgaggagcagcacagttaactgggaggagtgggggcttcttggaaaatgcagattttggtagaccctcccaggggacagtgccatgacatctggattctttttctttttccctttttttttttttttttttttttttttgagtcagggtctcacatcattgcccaggctggagtgcagtggcatgatcttggctcactgtaacctccacctccccggttcaggcaattctcctgcctcaacatcctgagtagctgggattacaagcatggaccaccatgccaggctaatttttgtatttttagtagagacagggttccaccatgttagccaggctggtctcgaactcctgacctcaagtgatctgcccaccttggcctcccaaagtgctgggattacaggcatgagccaccgtgcctggccagggcatctggattcttaacaagcttttcaggtggttctgatgcacatcagggtcttagaattacagggataatcctggggctgatactggatgatgtttgctttttagtcacttaaccagcatgtctttttagatgaccctaggttgcagtgtgctgagcaaggaagaaattgtagtctaatcaaagacatgacagatgcatatgaaggcttaaatgatagcagttaaatagttaaattcaacaaacagattgtattttgcagacaaatcataagtggttaatttttcacgttttaggaggagccagccacagagagaactttagtattgagtactgaataatcagatgtgttttcttagagtgaaggttaaccactgtggctttagagctgggtggtgaaggatgtataggagtttatccagtagagaaacagggtggggcattccagggaaaaataatggcagcaatgcaggtctcggtctgggcatttcatggtgcctgtgtgataagagatcagagagaagggtgtgtgactgccgacgaccttctcctgaggagaccctcagagccatggggaagagatgagattaggctgggcctgaggtgcagatagggatgttctagaattaaggcatcaaaggctggaacttgagtcctgccacagaatggaacagagtggtagtttaggttatttcagttgttgcatgatcaatagcatgagattttcacttgaatgtgggagccaaaagagagaaaattcagtgactgacaaatctaagatttctagtttgggggaccagtgagatagcagtgtggctggccagaagtttaggagctatcctaaggttttgccaatgtcggggcaatcaaggaaaaccactctgattacagagttggcagagatggagtttctgatgagaacattctgggaagatttcactttttctttatacttgagtagccgtatagagatcctgccagtctggttgcctaaattcatttcttgtcctcttattgaacattaatgctcataggaaaaaaaaaaagatgggatcaacaggtctggaggctaaatatcatttagtttgctgcagaggctcagagaaatcagagtgtcagcagataatcacttcatgcttcatcagtgtgctgaaacctcatttacagagggacacatccaaaccatgagctctctgcaacaagcaaaaggacctgcgaaacagctttgcagtctgggttcatttgttccaggtaacgcctgcatgttccatgtgtctgccaccttgataagttcttgggtggtaggagccaaagaatagaagtaacagtccttcttcttcttcttcttcttcttttttttttttttttttgagagacagggtctcgctcctttgcccaggctggagtgcagtgggacaatcatagctcagtgcagccttgaactgctgagctcgaggtatcttcctacctcagccttccaagtagcaacaactacagacacatgccaccatgcccagccaatttttatttttattttttgtaggggtctcactatgttgcccaggctggtcttgaacaatctggcctcaagtaattctcccaccttggctttccaaagcactgggattacaggtttgagccatcactcccagcctaacagtctcctaacagtcctttgattcagcaaacctttactgtatggctgactgtatgccaagtactcccctagggggcgaagtatatacaataaataaagcaaagttacttctctcaaggagctcctgtgatagttgaggagatggttgtgtatagatgattaagattaagtgttacaactaccgaaacagaatttcataccaggtacataggtaccacagagcaggaagtgattaattctaaggaaagagagactctccttaattctaaggagaaagagacttatcttaggggggaaattgaggggtgtctggggagggcttcctggaggagatgatgtaatgcgtgaagtttgggaagataactgaccatttttctggactgaaaaggaggtgaagagcagtctaggcaaagagcacagggaaatgtgaatagctattgcttctcagcgttcagtgtgtaaggggagtgtgttgtgaagggatagacacatggttgcaaatgcaaattttatgttttaacttatggaatgggaagatggggcaaaattgtgaaatgcagtgcaatgcgtggaactcatctgtgggaagcaagtacattctcacatcagctgttcagagatgtgtttttgagttctgtggacatgggaactgggctttgataggagatggctctgtgtcagttcagccctctgaattaacagatgaggagaggatcactgggttagggcagaggtgtgtgggagcagccaggaaactttgccttcccattccaaggatgggaaaggttagacaaggcgtgtctgtctgacaaaattgctgggaagagaggtatgaaaggaggacatgagactattgattgtaacccattcattcatgtagcagagttgtttattgagcatttgctttgtggaaaaacacaggacaaggtgctcttagcagtgataaagattattccctggtctttgtcattaaaacattaccatttttaagagatgggtacacaaaaaatcagaataaatgaggataagaagaactagtgcaaactgcttttgaaagaaagagtgatatatgaatgattctaacaagggtttgaaaggagggaaaagcttcagctctgttctctgtccatccatgagccagtttttttccttttttttttttttttgaaacagtctcactcttgttgcccaggctagagtgcaatggtgtgatccaggctcactgcaacttctccctcccgggttcaagcgattttcctgcctcagcctcccaagtaggtgggattacaggtgtttgccaccacacccagctaatttttgtatttttagtagggatggggtttcaccatgttggccaggctggcctggaacgcctgacctcaggtgatctgcccactttgccctcccaaagtgctggattacaagcgtgagccaccatgcctggccacattttttaaaaaattgaaataacttttagacttgcagaacagttgtaaagatagtacaggcaactcctgcatactcctcacccagcttgccccaaagttaacctctgtaaccatggtacaagttatcaattaaaaacttagtattggcacaatgccaccacctacagaccttattggattgactcattcttctgccagcgtcctttctctgttctaggattccacattgcattgagttgtgttgtctacttagtctcccccagcctgtgatgattccttggttttccttgttgtttatgatcttgatcttgatccctgtgaagagcattggttaggaacgttatagaaggccccccaatttgggttctctggcattttctcctggttaaagggagcctgtggatttaggggaagagcaccacacagaggtgaagggctctccttaacatatcatatcattggtatattgtgtcatgccatcgagctgtcccatttctggtgatgtgaacctcgatctgattccctagttaaggtggtgtctgccagccatctccactataaagtcactgtgtttccctttgtaaccaacagatactttggggctaggaaatattctacttctccttaaacttaccacaagctccttttcaagcctttgtcatggttcattctaacctttctcctactggaaacagcactgtggcttcatgcgatgctctgtcttccatcttcctgcagttggctccagggaataaactcacacaccatggatgttcccagggtgatggtagcaggtgtaaagcattgcttttatttatgtagagaggaaatggtgctcagggctagcaatttttccaaacgcacatttctgaaagagtatctgcactactttgttttgctatcatggcaacaacactgaagtggaggaaggaaaccctgaggactggtctgttcctgatgatactgagctgtgtgacctcaggcgaggaacttgagttctctgggcttcagttttcctaaagtggctgaggttagattagtcaattcctagagagactttcactggtaacattctgtagttccatggtgagatttccttcttggctaaaactctacctctaataaggaaaactgagttacaatacagtaaagaaaacagatatgaagggtgtctgggtgttatatgaccttggagtctctgtaattgagacatccattaagggtattttgaaatcaggctaatgaatgagaaataaattgctattttcaaagtctcacaaaagggtatacatccaattatagtggatggctgtaagaaaggacaagctctttatgttcaagacctttcctctctgtagcttttcacaagattagattgcctttagttacccaatctcagatttccactctagtgctactggtgtttggtatttctctcttcttttggagtatgcagacatctctcccatattagattctgggcaacatcttaattcttaccatatggccgtattcttaaagctgaacatggaaatgacctactttatccttttttttttttttttttttttgccaaagctaatcctaggcatacacttttttttctttgttctgctaatgacaatgcttgttctttgctgatgggcatgtcactgaaaaggtggcaacaaagtctgattaatttcagagcatgaatttcaaaccctctttgacgtcccataagcatcccagattgtcacattttccccctttctggtcattttctgctaattgaccctttttcactttagtgctgctttttgctttgtgagtttttaccttggtttaatttatcatttgaaattcttgccttaccatttgcaatttgcatcgtttcagaaggatgaaaagagctcaatgttcttccaggagataatgtttttaggaaagggctctctttagtggctgtttaatggtagaatggctacccttcattctcaaacatgttaagaccaactcactaagacacacatgctggatttctgactgggccggaaacatatggaatgttactattgtcttagtattccttagcattttacttaattctaatactagtcctattggcctgtaaggtgactgactagatttttttttttttttttttttgagatggaatctcgctctgtctccctggctggaatgcagtggcatgatctcggcttactgcaagctctgcctcccaggttcaaacgattctcctacctcagcctcccgagtagctgggattataggtgcacaccaccacacccagataatttttatatttttagtagagaagaggtttcgccatattggccagactggtctcaaactcctgacctcaggtgatccaggagacctgctttggcctcccaaagttctgggattacaggtgtgagccaccacgcctggcctttctttgtgtggatttttaaagtgtctgccatgtttggcagtgtgctaggtgctggaactcaaaagtgggcaacccacaggccctgccttcaaggtgctcatggtctagtaaggaagacagcaaaaatacagaatttcaatagaatgtgttaccatagacataggcacaacatacagaggtaagagaggaaggaatttttaactgtctctttaaaagaagaattcagggaaagctttttggaagaggtgttgtccaaactggattttgcaagatgaataagatattgccaggaagaaaattggtagaaagttgtgaacactgtggccgcagaacacagcaaggtaactaattggtccgcacaaatgaccctataaccttgtagggttataagcactgaaccatgtaagatgttgcatagtttaattgtattaaatctcatacaaccctttagaacaacatcctctccaaattcgtagaagatattatttctctgaaatggaaataagtagtgataggatggataaatgaagccattgatgatgaaaacgtatttgtactgctacctacctggatcctccctttacttgtctttaagtcatacttaactggtatcttcagtgtagtaattgttgctctacagttttgtcttttttttttttttttttttttttgagatggagtcttgctctgttgcccaggctcgagtgcagtggcatgatcttggctcactgcagcctctgcctcctgggttcaagtgattctcgtgccacagcctcctcggtagctgggactacaggcatgcaccaccacacccagctattttttttttgtttttttttttagtagaaacgggtttcactgggttgactaggctggtctcgaactcctgacctcaggtgatctgcccacctcggcctcccaaagtgctgggattacaggcgtgagcctccacacccagcctacggttttgtcttcttaccatcatttgcttttaaatcatgtgtaagcaggtgtggaggacctgaagatggttatccaaagatctttactggccatattcatttattgaactctgaacatttgaaagcagttattaaaaccctttaatccatcagtttgtccatttgccacacatttactatatgtcaggcgttatgctaaatcactggttggcaaactttttgatctcgtgacccctttatactcttaaagattattgaggatcttaaagagctttttgtttatgtgaattacatttattgatacttaccatccaagaactgaaaatagagaaaataatttaaaatacatgtgttttaaaatattataaacccattgcatcctaacataaataacatattgtaattaaacaaaaatcttccaaaacaaaaaccagttagaagagtggcattcttttttatttttgcgtatctcttttatgtctggcttaatagaaaacagctggattcccagctctgcttctgcattcagtgtgtggtggtatcacacatcatgtaacccctggaaaactctactatttgtcaaagtattatgaaaattgttttgacctcatgggtttccttggaagagtcgacccctgcaagggaccacggaccacacttgtgggaactgctgtgctaaatcatgctgcttccctctatggagtggagatactgaatcctggaggtgccttgaaaagaacctgaggaggcagagctgtgggctgaggtcctcgggtccatattacatcccggcagaggagatcacgcatccttcatgtgaccatggttattttggtttgaatccacaaaagagaaaagaatgcatgtgtttagattttctttgtaccaaaggaaaaagtatgtagatgggtcatgttaaaacattaaataatgggttagatatagcaatacattttaccccatcagaagatattttcaaaagcgggtatagtctatatggttagctattcaaggacttgccatgggtgtcatgtttccatttaacagttgtctcctgctaggttgtttgtcatttatatgtaagcttattttcttttttgtaattaactcacaacctgtttattcctttttagtatttgtgtatatattgaaagaattgcatgattttttgtttcttcacatagagtatcttttatttttaaaaagaatcttggggtgatggtttattttagagttaaatcaatcaaaatatcaaaaagcttttcctctgatgccttagaagtgttttagtagacacagcactaccagtattttccaatatccttgaaagaaatggctgtgagcattctagataaaattgatatatttatccatatttttctgctcataaaatagaatttgagcactttcagattatattttcaaatatttagggcaatgtatttaaaatgttttaaaaattaactggggaaaaaggatgaaagagttttaatttccttggatccgaataattcaagttgcaagcttctgtattcaattttccttgccttctgttggttggtttgggatttttcttggcctgggattgaatattttgtatcactttaggaaagtcaggatgtagctagctttcaaagtaataactcagatttatagttgaatggatttagaatcaaaggattttgaaaaacatacattaggttctttgctcttttttagaatccgagtattttaaacacactttccagtgtaacacttggagtcttttttaatgctaagaataagaaaatggaaggaaggtttttatctgcctcccttcctcatttcttcccctttggccttctttccttctttttctcctttcttttttctttttctttttttttttgttgagatggagtcttgctctgttgcccagggtggagtgcagtggtgcaatctcggctcactgcagcctccgcttcctgagttcaagggattctcctggctcagcctcccgagcagctgagattacaggcacatgccaccacacttggctaattttttgtatttttagtagagacgagatctcaccatcttgatcaggctggtctcgaacttctgacctcaagagatctgcctgcctcagcctcccaaagggctcgggttatacgggattataggcgtgagcaactgcaccggcctccggttcctttcttgttttttatttttatttttattcttattatataattttatgcctctctttgactcccaccctggccagatttgtaacactcaaatgtccattaaaacgcacgaacagttatgtgatggaagctgggccctggtgctgacagccgtatttttcacatcgttgtaaacatgtgtgcaaccacatcttagtttttagtttaattatttctaataataatacagtgatttataaagtttccctttcaaaacaaaatctggagtgtgcagaccactgaaattacaaacatatttaaagatgtaaaacgtctcgggtgaaaagcccaagcctgtcagtatttctaagcacgcatttctggaaacccaagtccccactcacctgtttttctaattgcattttccttgaagtgcctttgtgctcacttggattctctagctttaactcagagcagcaaatcttcctcttctctgctggaagtagcattatttgtggatgctgaaaagttctagaattaaacatcagaactccttccatcgcttcacagaaggtgcgttataaacactgaatggctgtgtagggattttgtcttcaatgtcttttaaatcttcaatcatcgatatccatttaaggccaaccaatcctgtttgcttcctctttgccatccccttcccccgacctatgagagcaggcattcaataaatgtaggtagggcagtgaatgttccagaggccagttacatgttaatttgaagtcaggacatataaagcatgaacatttatgttaaaacctgcgtacctcttttgttagtgtataaatgccgtaattttaacaacaataataatagtagtcatttttactaaatgcctactgtgttcctgacatcatattaggcacattatatgtgtcatctcattttactatgaattacacaactctgtaagggttattattttcccattttatagttgaagaaactgcagcttgcccatgttcatatggcttagtaagcatgtttttaagcagttgataagaataattcatttttagccaggcatggtggctcatgcctgtaatccccaagcattttgggagactgaggtaagaggattacgtgagcccaggagttcaagatcaatctgggcagcatagcaagatcccatctctgaaacatgaaagtaaaaagaaatattttctttttgcagattggcatgcttaaagggctgaccatctgatgtacaggaaatggaaactactctctgaaaagcaagtgatctcccagccgcacccatttaggagaccaggattttattttgatccacaggagactaaatgagttagaggccactcctgtatcaacagagtttgttacttaaatgacagtagggcggttcgcagaaggaacaccaaatagtctgactatctaccaagaagagagtgtttgaacacatgtgcaacctcttgactgtggtgtgtggggcagcatttaataagaaagagctaaatctgcttgatgtgggaatatattcaacacatgttaagtgctaaaatattcaaagtaaataaatgtctatgtactccatattgttaaagaaagaatgtgtgtgtgtgtgtttgtagatatagagatgaatttaggaacctttatgatggtgtattaccaaactattgacattggtgatctttgcagggcagaagcctgtggttggcgtgagataggagaggtttttttcattgtgtatgccctcattgtttcactgctacaataacttgtgacattttcttatgagattaagaaataaaacttaaggaaagaagacaagcccaactcagagcaagaaatatgggtctgagacttagctttgtggctcattagctctgtggcctgggcaaacacataactttggtgagcctcagtttcaacatcttcctttctattttattcgagactgggttttgctctgtgtcccgggttggagtgcagtgacacaattatggctcattgcagcctcaacctcccgggctcaagcaatcccccacgcccccacatcagcccttccaagtagctgggaccacaggcacatgccaccatgcttggcaagttttttttttttttttttagaaacaggatctcactatgttgctcaggctggtcttgaactcatggactcaagcatttcttctacctcagccacccagagtgctggggttataggtatgagtcaccgtgcctggcccctatctttaaaatgagaaaatgaggtgagggaactccctagtctccttggcccttgtgttttgtaaaatctcatgagactctgcccttgaggcagcttggcatttgtgctcattgaggactgggctgggcagccttgtactatttcctaaatttgaatcctaaattttcctaaattttcaggaccatggacacagccctcgtggcatcttgaagtgctgtgcttgcccaccaggacttttgcctgatgatccctgtgctctagacagagtgaacttatgtgatgcaaagccattactgctgaaatagtgttttccggctagccatagtatagacccagagactttccttctttcacttctattttgatgtcattgtttataccctgtgaaatcatgaggctcttgttatttaaaaaccagtagaatagttaagaacatgggctttgcagtcaagcagatttgggttcaaaccccaaattcactagctgtgcaactgtgggcaagttatttaacctctctgggctcagtgctctcatgtagaaaatgatggtaataccaccttagagagccattatgcgggtcagatatgcataagaatggaggctttagtctctggaacatagtgagtatgcaataaacattagctggcaatcagtaaaattctctttccctacggaacagatgcagggtaaaaatgtagggttgtatggctgaggtttacactggagcctgggaaggtgtagtcaggctcaggagtcatttgctccatttcatgtatgagagcggttgataaggatgacaaatgcaaatactaaaatattttgtcagaatttatgacaggaagttttgacacagtgatatactacttcctgagaaacatctgtgcattattaatcctggatcacatttcccgcccctcttttgccagtggcataagctgcgtgagaagggagaagtctgtttccagaacagtggctacttgcggttgccagtgacaaattaaatctgctgatccttattaagaattttctatggccagtggttggctaagagctggggaagccaaggttagtaagaaccagcctaactcttaaagagcttactgggtgaaactaggaaatggctccctatggaagaaggcagaatgtaagctgggtggtgtgggggcaggggggacgtgacagattctaacagaagccagcagagaaggctttccagaggagacctttgagccaggcctgggaggaaagcatgagacatacatttcaggctggagaatgggcttgagccctggcagaaagctgagagagtaggtaatgtgccttgtaaatggtgagttgccccaggaggtcagagttaccatgtttgtgaatggccaggaacaggatggaaatgttttccaaaatttctgccaataaaggtctcctggggagtttgctaaaagcacagattcccaggcccctcacctgctgattcagacccagtgtgcataccacagatctggaagatggatctgaaaagataggaaggaccagtttaattagagccttgatggagaccagcctgggcaacgtagacctttctacaaaaaatcatccaggcacggtggcacaggccccacatgcctatagtcccagctactcgggaggctgaggtgtgaggatctcttgaatctgggaggttgaggtcgcagtgagccgtggtcacgccactgcactccagcctgggtggcagagcaggaccccatctcacacactcaaaaaaagaggcttgaatgtcattccgtattttgattttatttgacttgttattccagagcatcagacgatatttttaactaggtgttttgtgcagacctagaagattcacatggcaaatgatgttcaggtgggtctaggtcagtgatttctaatgtgaggtccaggacagctaggggtccatgaagacctgaatgggttgcctgaaactattttatgtgcttaaaaaattccaacacaagttatgcatttatccttcctaagttttaaaatagtttaaacagttttctctttaatatggaactgtattaacataatatggtgaatggatgaattcaggctgcacagtgcagtggttaaaagcatggactttgaagacagatctggattttagatttgtaccaccactttcaagctgcaagatcttgagcaagttactgcactgctgtgatccagttttcctgtatataaagtgggggtaatagtggtacccagctcataggattgagatgaggattacatgagaggatcctcgtacagtgcctagtagaaagaaaatgttcaaaaatgttattaataccaggaaagagagatggaaaaggaaaaataaaataaaatttaaaaaccacaaaaatgttatcaatattaagctgtctcatggaaaaataattatatatgactacaggtaattttgtttggtagcaaaactcaggaaatagtaataacgcaggaggcttgaaggtgaaaaacttgcagaggcttctcaaaggacttgcttggacacagcatctacagcagagagcaaagacatgccttttttttagctcctcccagcccaggatacatgctccttaggggacccttagacttaagctctgcctctgaagtgtgatttaccctggaaatgattctaacggaaaatagtagaaaactgctttccaggagaagaatcaaaggagagtatgtatttactttgggcgattttcccattgtactggttatattgccaagaagttaaaaatagtggtgataagcagtctctgaattggtccctcctgaggtggcaagggtcaactgaaagtaggatcattcctccggggccctgagacctatcccccttgaactctgttttgagagcccctggtggagcatctgtgggctgctgtcctgggatctgcatatactacctgagtttccctcctgtcttatcaattcctcagacttgttcttggcctctgttaagccaaccgattttagatggcctcatcctttaaatatgctatttataaccactaatttatgttttcatgatacttcatgtagcagctggcctttgtgccaccgtaagaaaggaataatgaaatacgtggtatttatatgggtggctatagtgtttgtcatttcgtatatggattgctattgtaggaagcatgaaaaattgcaaagggtatttttttctcttaaagataagctccagtgtattaaatattcatctgctgtgtaaggacactataccatttttttttgtttcttcatccttattttctcatggaaatatattcagatgtctacaatatatattgttctcataaaatgcttctcactgcaactggtcccctgagcaagacttaacatcttcatcaacagctgttacaaaatatgctaatgtgcatgcccttcagcctatagggtcacatctaaataacaccactgaagcacacttgagaacttgaaccctggcaagccttgactttgagctgcagggtgagatgttgaggatcggtgtcccaaagaacctttgcccttttaaaggcatcgttcctctccccagctgcctcattttcaaaggcaacgttttgtgtcttgcattttattgtttggctgagctgaagatacagggaggacagatgacccaggcctctctgctaaagatgtagccagtaaagctaagattcccaatgggggccacctccaggagcagtggaggaaagtgagcgatgtgtcataggttatggggagactgcccctctgctgggaattattagtcaagtagggctagcagctctgcagaagtccagaagtggagtgggtggggaccagtgagtgttaataccccacatctgagcagtgtattctcctttaataaatttacttccggatccctgcagaggggtggttcttagggtgtgggcctggattagcagaatcagcatcacctgggttcttatttgaaatgcaaatacagacctactgaactctgggggtggggccaacagtctggcttagcaggctctccaggtcattgtgacacatgccagggctgagaaccattgccccagaagcacttaggcctctcattgggctctcctgttcctagcaagatcacaaggatggcatagcccacccaccgtgtgcccctggatgggtgtagggctgtggaggacaccggagaagcaagaacttgatttctgccctgaaagccaagtgtgccagctgcccgtggggcaggtctggtgtagttttgatgatcagagtgagtatgagccagcatgtcgccaagtcctggagcctggaaagagggcgggcttaaatcagacaatagcaaattcaaatcctgcctttgctagtgaccagctgaacaatctgaccaaattgtgtaacctaagtcttactgtcgtcacctgtaaagtaaggcggtaacatctaccagaaacgactattgtgaggaatggaaagtatggtatctagagggtgcccagtaaacatttgtttttaaaacgaagagtgaggatatgaaactgtaaaaggatgtgtctgtgcactatccagccccaattacgcttccatttgctttcattcaaggttgatccaaatggctctgctttacctaactaagcattaacaaccacttctcttttgactgctagtgctggtattggtatattgatataatcatggctgtatatttggagcacttacaatgtgccaggattgtgctgaaaaatacacatatatgctctttttatattttcataatggttttatgagagaagtatggcaggcaaaatagcgaagtccataccccaatccctagagcctggcaatctgttaccttgcatggaaagcgaccttgcacatgcgattcagttaggaccttgagttgggagatgatcctggattaactaggcgagctcagtgtaattacaggtccttataagaggcgggcaggagagtcagagtgaaagaaggagatttaatgacaaaagcacaggacacacaaacaggaagagaaagatttgaagacgctacactgctggctttgaaagtggaagaaagggcaaagagaatgcaggtggcctgcagaaagtagaaaacgcaagaaaacagatttctccctacagctttcagaagaaatacaagcctgccaactccttgatttgaagacttctgactttcagaacagttagtagatttgtgttgatttaagccactgcatttatggtaattgatcactgcagccacaggaaaccaatacaggaagtcttatgactcaacccacttgacaaatgaggaaactggggatcagcaaggcacagcagctcaccttgggtcacacagctaggaggcagtgcagaagtaaacacacccacatccaattctagtacacacgcttagaactattatgatggacacggtgcctctgggagtaggtgtcctgcagagtgaggactgccttctgggggttcttttcaattttaccatcctgatagggtcaacagaaaggtccaccctgggatgctgcccaaggaacatcatacttcctgatgaaatccaatgaatttttcttcccaggtgccctgtaccaggaatgtgagctgtttcttttttttctgaggccgtttgtaaggaagacagttgctggggggtttgaaggaaaaacaggaagtggcttcagcatccaatgcaaatcaatcaactgctggaagaagggccaagaaaagaaagctttttttttttttttttcatgaaaatggaaaaacgaaaccaagccacagacaacaataaagaaacatcaaggctagaaaggctggagaaggcctcagcatggactagctccctgctgaagccgtggtgtttacgtcccgtgtgaggaggaggcagagagggggtaccactcttcctctcacttaacaaggttatcctctgctgccacagaagaggaacctgcagaagaggaggcagagctggccaccaagagagaagctgtaggcagaggataccaggcagagaggtatcatcgggaccccaaagagccaagctccagattgaaagtattttttagcatcaacgtcaagccagggccttaaaagacgccagactttttttttttttttccaagctgtgtacagggctgtaagagtgcaaggcccagaatggcaagggttaaggcgaagggaggctggattccccattcagttccacagatgcctggcgtctgcaggggacttggcatatgctaggggatccctggggccagtcagaggagtcaggccagccctgccttcaggagtgttcttatgctctggcagggggaatacagcaagttcccaagctcctttaaggtgagatccagcaggatggaggcacaggaaggtacaaagagtggtgtggcttggagggagaaagaaatcacatcaactgagtggatagaaatgagtaataattgagaggtcactccaaggcaggttccaagctagaaatgatcagatgagtgatctcatttaggctgtcagagactttgggaggtaagcattacacccatgcagcttgggctcagagaggttaaacaacttgcccaaacacagctagcacctgctagaactaggactgaatctcggtgttttgatttcaagcccagcatactgtccaccagactgagcagactcctggtgaggggaaccataaaacgcttcatgtatcatttaatgacaaggaaagatgttcaagagaaatagctaagtagataaggcaggttatgtgatctagcgctcattaagacacacgtttttatttatcctaaaaatatcaagattaatatataatacaagggccaggcacagtggctcacacctgtaatcccagcactttgggaggccgaggtgggcagataacttgagctcaggagttcgggaacagcctggctaacatggcgaaaccctgtctctactaattacaaaattactattttgtaattttgtaaaaatacaaaaattagttgggcatggtggtgcatacctgtagtctcacctagtagggagggtgaggcaagagaatcgcttgaacccagaaggtggaggttgcagtgagccaagatcacgccacggcactccagcctggacaacagagcaagactccgtctcaaaatacatacacacacacacacacacacgcacgcacgcacgcgcgtgtatatatgtgtatatatgtaatgatttacatatatatgtatatgtatgtatatatgtgtatatatgtatgtttttaatatatattatatatatacattacaagttttctacaggaaacaacactcagcatattcctaaatactagtagaactctgggcttttacaactgtttggtggagttttgtctgagcaagtttccagatgttttataggtgcctgaaaaggtaggtgaacatcaggggatatccccaagagcaaatatacagaagcaagaaatgttagaaccatctttgcatctgtgtgaatgtgcaggaaacatgcattgaagtgtggctgtaatacagggactgtgtaggagagtggtgggtggggtgggaccaccttggagggtcctgaatgccacattaaaagatttcggttctacagattatgaaggacctaacccagaggtggtggttgagatgctgtattaaaagtaacaccttaaatgtggcaggggattaagtgagatctaaatttgaaaggttggttttcaacataagtgtggggaaagctccctgatgccaaccttgctggtcctgaattgtggcacactgtcaccacctggtggtcacatagccaaattgtagggctaatggatttagccagagtcctggttgtagagaaatttcttcataaaaaaaaaaaaaaaaaaaaaaaaaaaaaaaaaaaaaaaatcctggtcaaattatttgcatcctttaaagagttctaaaggcttataaatatctggataaggatctcaatgtttattattaacctgagtgtctgtaataatgtggacacattctttaagtaactcaaaattgttcaaacctagcagacaaagaacattgtcattttctggactatatgaatatcaggatccatctggaagttgaaaagactcaatagctttgagatttgtaatgaaggaaaaaaaaatcttttaaagtaattcctagcaggttgacatttaagagacttaactgctgagtaccgagtgaagagtgatttttacagaagctctcgtttcagctgattccagggcctgattagatgtcattacaagaagaactggattttgaacagagaagcattaggggtgcagccgattctgtgattttgtgtatgtgtgtcactgcagtttgagacatctggcaactacaacttctttgtcattgtctactgtaattccagagagggcaggtcttaagaaggggtgagcatagctgggctcagataattgttggtgagtaggttgtggggatgaggatggggaaaagtaatctaattatggagatgtacatgagaatggagtctttattaccatgctggccactggcaagcattgtagctgtggataacatgtggataacatgtaaagggtatgttctgcttcacaagtagtgctctgtgtggtgggatgagcactgtgctaggagtcctgaggtccagatcctagctctggctctccctctaacagagggagactccctctgtgacttttggaaagatgacctctctgaggccacatattctttagctgtaaaacttggttttatatttccccttcctataatatcatgctgctgtgagattcaaacaaaaagcactgggtaaatataaggtgatataacggttgtcaatggatgtgcaattacgtttgaaaagtccaaatgttgtgtaagattaactactcctctcctgcctcatcccttttcttctgttcttctgcctgctcctgttctgtgtctgttcatgtttttattcctattgctgtccctgggccctcctctctaaacagattcacaaggctgacgtggggaaattattctggtattccaagagacatgttcatctgtgtctttctggtgcttgggcatgttgtaggtatttagtagaaactggtcagtttaatagatcgtgaatactgtcagtgtctttcttgcatcttcatcgaggtcctcagtaacctcttaaggaaagagttcttgaaatgtttcagtcttttaaaaaaaaaagtgaaagatggcatcagtctttacgtttgctacatttctcttccacatactggaatatcctttcattgggctgatgccccccactcagaagagtttgaaaatcttgcacctgatggcagccctgcatgcattaagagtaaaggtttcagagtcccacatcgagctcaggtcagacttctgccacttaggtctatgtggccttggacaagttacttcatcatcctgggcttcacattttgtatctgtaagctgaaaatctataaaccacagatagtagttgtggggattaaatgaggtctctgcaagtgtctggagtaaggggtagatattattaatgtttgtaaggcaggcctctgtgtttgagatttccacatgccctgtgcaactaagaatgggttgaagattttcagctttcatgtttaaagtgggatgttgtttgcccctctttcatttctgtgaacccctcctttccctagtcatgttcctgtgtttccactctcaagtgatccacagaaccctcaggttccccatccttggggattggtgggaccccagctctccaactctcttctaatcaagcctttgatctattttacatattggcatttagaatggaatttctttagggtaaaagttctacagaaaaaagacaaagagttttgaaacccaccaaccactggccgtggtctaggataaagacactggatcaaaagagggaattagataaaggacttgactttggtgaggcttagcagctctaaaatcacagaaatgctctggaaataaagaggggagctggatacacacagccacttttgaactgttgagaagatggggctatgattcctgcaagaagtaatccgaatggatgacagttggagttgcagccacaataaatatttctagcccaaatctcgtggaaaactggcttatgcccccagatgcctggtgtggtgttgacgtggggaagatactccctgtgttgaggcagcaggaaggtgaaaagaatgaaacaagtgttttttcacacacagattctgtatttcacaattacgcagtttattctttggggtttgctaggggaacctacagagagaagcaggatgccttcttctcagtaggagctttggagggtgtgatggagccacaggagaggggtaggtggtgcagggtgaagggtgctttgggtaaagctgccgatctgtctttgaaaaggttctctgctgtgctgtcaacagcatgatattctttagtattgatgggcacttgcaattttgtggtgcttcttggaaagtgctctctaattacctggaacatttatattttttctgttatccctccatacctctcttaatttttcaaaaatcagtctttcagcttccagatctctttagcccttaacagtagccttctatataatctgcagatctggtacagaacatagtgttaatttagaccttactgatgcagaatttgtgataactgtgtcagaggttgagaaaaaaaaagatgtaactagcattgctcaggaggaaagggctttgctggagcaagttcatccagagctcatatgatctacccaacaggaacaaagggcttgtaggtatttaagagcatacaactgctgtcctaattgcaaaccgttctagccttttcatacaagcaggacctgtatacggcaatggttgcattgcttaggtttgtgttactattcttgataaaaaagcaatgacacctgattgttcaggaaaaacaagctttttactttttaaagattccacagatccttcactcccaatctttctaataagcctggagtagagtggtcttaccacatatgaaaattttcagcctgccagccgctgctggtaatttatgggtttggacactacagagagacagcaaatgtggaaaatatctctaaagtgctgatgaaaccttatactcaaagtcagaaaaagtacccattaatacgtagttaagactacaggctccacatgtttttttttttttgatacaggccactgagacacctgggctcacctattggctgtaccattgatgcacagacacctacactctcttgagagatgaaacctccagttgtaagatcttgtgtgtgctttggggttttttggttgcataggtgtttaaactatctaacagtttattgagcccagactcagtgatctgactaatttggattaaatccctctatatcacttgctgtgttaccttgggtaagtggtttcatctaagccaagcttaggtttctctatgtggatcatgcaggcaacaatctttttggagaaataaatggcatgttaagagctcagtgtggtcctttgtgtgtaaaaggctctcagtgaatggtgtgtgattgtgtgcgagctgtgtgatggttttgagatgagaagatgacaccagatttcctgtgacaaactctgtggaatttgtcattgcccctgagcagatcagcagctgtgactcctctctgaccagctaccactgcttcgatgtcacctgtgtgccctgcttggcacgtatctggtctcaatttcgtgtcttccctcatcggctccccttctttagtaggaagtacgaatcttgaattgtttttatctgacaattagactcaggtctatgtgttggctgctggtggtgttttcttgctttgtctaatttgtcagattccagaaccttatacatgtcctgccctctagaggaggcctttacctggcagaatttatgtcttctggaaaactgacttgcctctgaatagatattgctaggtgccccgtctcatcatgacgctgatcgctagtgttctatttgccctgaccaactggtgtctcctggaacacggatcctcttaggctctgctctgggacccagaccccttgtccatttaatttctatgtggccttccatgatttggcatattgatactaaagtaactgatggatgcaaatgtatccacacacagataaacagagaaatagatagttaactggaaaacagcaagtagaatgtttaaaaaccccactaaaatagatggaaggaaatcatgatgtgttactaagttaagtgtgtttctcttgccacttggagccattggcattgattgattcattcattgacttatcacccaacataaatcaggtccttgcaccttatgaatcgttctgctgagtgcggtgagtgacgcataggtggcaagacctgctctgaccctattaaatgtagcatacaacaattctgtgttctgccaaattccccagtaatagtggccttgtttccagttttatgttgaagacttgtaagaagctggaaactggtcacagacagcccatttattgagctggccaaagtagttattaggtaagtgaaggaggattggattgtgtgttgggaaacttcatttatggtctcggctcttttgctaactgtgggtccatagatatttaataaaacacttaaccttttcctaccttggtttctttagccgtagtaagaggcagctggtttgggttgagccagatctagaattctattaatttataaaaattatttttaaatgtcagggctaaaagagagggccatggacggctgtcacctttcccccttatgttactcacagttggtagagtccctcaccaagaccactgttagcaccagaaatgcccctactggcagcatctcctccatgaacaggagcccttgtgggtgctttcgtgtgtggccttttgtcaaggctaaagtctattaaaatacggactaagatatttcttcttttgctttttaaaatgttttagttcatttgaaaccatgaccactgtaatgacccaggaccgaggaccagatcatgtggttaccagacacatctttctgtgggaatagtgatgatccaagacacttttatatggatgcctacagcaggggaaagttacacattacactgcaaagaacattcgttacagatcataacagctatatcatttctttactgtgaaatatttttaaggccatttttcgtttttttctgactgtaggcaaaagtagatgcttattttggaatagaaaacaataacaataaaatattcacttttaggaccacttttaacgtgtgtatatatctacatttctatttttggatatttgcattctgccttttgcatcaaatatcttatgcatttgccacgtgattaaaaatggctcaaaaacgtgattttcagtggctgcatatacagttcatagtgattataccataatttattgaactattgccacagtatatcattgtatttttatttggaccccatgagtttctgtttttaagtggccttcacggggggaagataaatatgtctttagactaatagatttgcacttcatattggctatgagaagaaattgcctgtaattagcatcttcaaattatctacaatctaagttgcttgctgtttaaagattcaaatactagataagaactttttttttgagattctatttttgtagttatgtgcacccaagcccagtagtggagataagaacagtcaaaacaataaaacattaagaaaagatgggaagaggagaaaactgacatttatggagcacatgctatgtgaatgcgcatacattatttcattacgttctcccagccagtctgtgagatagatgttacttattcttgttctgcagaagacaaaactgagctcagagaggttcagcacttgcccaggtagctggaaaatggcagagccagcatttgaacccaggtctctcaaatccaaaacgcaaattcttccgattttatatcatactgcctaaataaaatcaaaccctggatcaaggtgactgctgctgctcttctgccctatattactgtaaagctctcaaaaaaattcagaaagatagtccacaagagcagtgttcccactgcttgggggaccatggagttgagacttcatatgggatccacaatccttctggctccagcatcatctctcctcccattgcttcagtcagagcaactcagccttttcctgttttacatattgggcttctgagtaagaagatgacccctattttgtcagaccccctccgcctcccaaatgcacccaatcccctgtccttttgcttcagtgaaatacaattggcttttaatgggagctcgtctccaaacatccgtgcttgccccagtgcaaagtgggtttgatagattggtacttgccccagaaacattcttcccagatttccatgggaaaccttcattcattgggcaaatgattggttgggtctcagtgaagaaataaaaagaattttctttgtgttcactctgcattgtgacttttatgtcttcgtttgtgaagacagctctcttcataaccccctaatatttcccagagaattctccatcttttctgtgatcaattatgatagctctaaaatagcatgcagttctgaaattctccacttgccactatgtttcttatcacctctatagtttattcactcatccatttcttcatcaagcaggcactgagcaccagctatgggcaagcatcaggttctcatggcattctcagcaaagtccccttcttcgccgttgtttcatgcttaacatttgcagaattctgtttttcgagagatttttatatttgtttgaaattctaataagaataaacatatttactgaatattaaagctcaataagatagctatagtgtgaaatgtggttcaacattaaaacagcaatgctgtgaaaatgtgtaatgtaacatgaacttgtaaattataaaaaagttatccttctcacctcgtagttactttacgtatactactgtaggctatagacctaataagctagtatctataaacagggaaccgctttatgagcatcagtaatggaagcaggtttatgcaactttgctgttattttttgtttgtttgaagtaggtcctgtcagttcttggattagtgcttcgtgccaggaacatgagagcttatgtggagtgttgatttaagtttgtataacattgtcacatcatttcttttattcttctcaacaaccttttgatgtaggtgtttatttgcattcctgttttataggtaaggaaactgaggtcacacacctggtgatcgcagagaaggaactggaatgagtcatcttctatcccagggtccactacccaatcgtttgattttcagaactatgtgggaattttcttttatcatctgagtgtacccatcttcagatcctcacaaaatgaaaattctcagtacacatacatatttctagttgagcaaacaaatgcttttcattcacaataggaaactgaacctcacaaaatgaatttggtaatagctaatccctatttatgggcagctgcccaaactggtaaaacatacataatgcacacctcgttgccattgcacattcaaaatgcagtgtgattgccgcaaaggtacattattatccacagtcaatatgtcacctaaatgtatgaatgcaatacagtgtggtattttggaacacgatgttaggtttcctgattggaaatgttcttgaactaaaatatcctccgtgacaagcttttttgtagttataaaaaaagatcagcatctcacaggttacctgatttgctaattacttagaattcagatcaggtatttgtggtgaaattagcatgcaataaccatcagtttttgacaagggtttctgatggaagaaagggattagctgtgggtgacaagctggtaagtaaaaaaaattggaagtacattttcagggttaaattttatctctcaggttaaatgatggcttaatgttttaatgatgttcagcaagggtagatgggtaaataggaaaggcaaagctgcttctttatagggagagatgtgtctcgaaggggtgtggcatttccttcaaaaaggctgataaatgggactcttgatataggctaagtaaccccctttcattctgtgtaggaggatctatgagagctgattattttccagttaacaaagggtaggaagttgttcttaaatcagagtctgatttgtctagttatgtctatctatttatatctacctatgtctagctgtatatttatatatgttacaccatgcttgcgatttattgaggtctagtcgtaaaatgactaagattgaatctgagaaaagatcctaccacatcatgaatgtgtacttcccttgatatcctctgtccttggttaaaggtgcagatgtgaatgcaatattcccaatgtacttttccttgcggacctccccacttcatccttgccttcatcctttaaatgccatagaacgtgcttcagaatgactcactcctgaagaggaacagagccattttattctccaaagtgcacagtctttcatcaaatattgtttcagctgacacgacagctcccgcaacaatccagaccaggaacagtttctgagcctctttgggtctctattaccacatctgcgaactgagggaaataatagtacttacctcgggggagcggatgagcagtaaataagtggacacttgtaaagaatctagaagagtgggtggcatatagcaagtgctcaaaaattgtttattcaataaaggcaaaggttggcagccacctaggaagtaatgagctatgtagccatttagacataaaataggttaaacatcatatgcctttgaccaacattagccagcttggaggaggaatgaaaagttcatatccaattaatgctgcagatttcccagcccccgccagttctagaaagttgagaacccacaacttgcaaagacatcctggctgatctccagttgagatgacacttccagagaggagaaggctgtcaggtcttcgtttaagccaagtcagatcagcacatatttgcccgctgtctggaggagtggaaaactccacactgtcacttcgagcactccagggatcacatctgtcaggatggaattgctcatcccacactctgtggacaaggacttggcgtccaagtctgacatgtgaccaacactccatttgggatagtggtcacagcaaacccttctgaaagggaatttggtaagttttccgacaagtcagtgtgcagctggggttgggctttggcacgtcctctcatgaattgaactgtggctttccatgctctccagggtctgggatttggctccagctgaggaacatacacatacctcagaggcccgactctgttgctctcttcagctttgcatattatggaattttactaatctgggtctgagggatggggcgattatcccaatgctgggtttgttttcattccttccaccatgaacacatttatttatcgatttatttaacagtcatttaataacagcctactgtgtggcagtcacgaaactagggccagtcactcagctagatgtaaagagaatcagattcctttaaaacatatacactaatgggagagagctgcttaaaatcaatcgcaaagatttttttctttgtcttatctgtgtgtgcccagtgcctttcgttgtgccagcacatggtgaggagggctgtcccttaaatcttggctcctggagaacaatggggtaagtaagctgggtacaaacggctgtgaggatcaaatatattgtatctgtgtagtgcaaatacctagctgagtccagtattttaaactttataaatgtagtttcatattcactatatcacttagtttacacaaataacccattaactttaaaaggtattttttaacattttatgtttagctgaaactcagaagagttaacctacctccctaccatcacacagctagttgggtgtcatgcccaacacagaggtctctggattgaaagttcctttcaatattcatgatgttgcctacatttatgccaaaagggctatttttatttccctaagaggtgtcaaaacttaatggttcagaggatataatctattctcacttggtcaaaatacttggttttggtcattcttttttcatcctgcgaacatttactaagtacctaccatgtgccgtgtgctaccttaattaaatattctgtttcagatttactacatgtaccatgcagggttgtttggttttctgaagcttggaaaaggataaattatactctaccttgaaaatatgttgatcaaactattgtttggctgatttagaaggaactggaggctctggcagtacccaggttcttcaagatgaacatccttctcaccattcattacaaaagatagatggtattgggctgaatctgcactggccatattttgcaacctggaaaatcctttgaaaaagcaaatccttgatatgggccagtactaagttataaaagtgtgactttgacaaatttattaacctcttttcacctcagatttaacatctcttataacatgggggagtctggagaagacgtcaagttttaagggtctttctgtttccaagcctttgctgtatttcatctttataccctaaaggatggctcttataatgctgtagcttccagaactttcctccttctcagagtgcttctacctcctagggtctcaggcttcctgtttgcttttcactcccacagattcctgctgggctgttctctggcgccatctctccaggtctctggggaaggtaatggagagttgctgagaagacttgatggaactggctcttccaggagctattttatgactcatgtactgtaggggtgccggcctgtgggggcagaaaggaaactgcttgtttcttcttttctgattaaaagaaacaactcaaggaaccgactatctcaggcagcctccttttccacactattggaccatttgcaaaaattataacacaaacaaaaaatctagaatcatactaaaatggcaacaggaacagattttaacatatcttaatacatatcttcaaacttttccccccttgttttcctctcttttcctctgctttatgctcttaaaaaaaagaaagagaagtgacaaggaactggcttctcacccagtaaagagtaggaacagtcctttggcttttgagcagatcatgagattttttttttcttctgcaaaatttcagggactatcttccagaaaagtcatgtgcaaggagagtgaatggttacagctggattaacacccagcctgttgggttctgagacgtcaacggtgtcttctctgtataatcccgttttccagaacacaaagtccagagtgcccgtgtgtgcattcctgccttggctgggttgaaacgcggggtctccttccacctggagtgtggcaaggagaaagctgtggttctgaggtatctgaatccttggatctgggcctggtgattcaccagctttgctgtttgtaaacacatcatcagcctttgtcaagtttcttctgtggttgggtaattaatgttattggaggaaactattattttttttcccctcacagctgaagatgagacagaatttgtcaggcatcatagacaagtgtattattttgcttaatctttcccattgatcggtctctgttgcctgatagcccaaggaatcttccaaagatcttcccatggctgcggccacaactccccaaacagctagggcgtatttaaaaagggaaaaccgggcaactcttctagctttgttcattaaccttctgttttcctcacactgttttttccttctcaaaatataaacccctttggtgctttctcttgagttggatttggctagtttcaagatttaagatttatatgcctgaagatgtatttcttctatcttttctttagctatagaaaatcaccttaaatttatttatttagtatttatttgaaggttaatggaattttatttttaattatttttgaagtaacatgctgatattcatctttttaaattaatttttaataggtgacacataatgtacatatttacgggacacagtgtgatgttttaatgcatgtatacattgtataatgatcaagctgggataattaccatgtccatcaccttaaacatttgtcatttctttgtggtgacaacatttaaaatcttcttgctgtcttgaaatataccaagtgccagtcacattgttattcactacagtcaccatactgtatattagaactccacaatgtatttgtcctgtctaactgtaactttcttcgaacatctggatccgggaacgtgataatctctgcatctgtgcccaaagaaatactccttgcccgggtgacctccctttcacaatgcgagaggcagaaccattgtttttcccatttctcagcccactctctattcttgagccagccgacggtgtcagtgtgtattttttgccacaactgccctaataacatttccatgtggaacacacactcacactgaggcaaagacacaatgggtaccctagctctaagaccaccattttccttcccacttgatgaaacataccagaatgcagggctgggagagggacttgactgtatgataaccttgaatctcctgtaatttacgaagtaaagtttaattattttgaaactttaaaatttgtactactcttagcaacaaatggctcatgacccatctggatgacaggtcacgtagatctgtgacctgtctgtgactgagaatcacttgtttccactacagagatttttccaaggatctcttgcccggaagctcagttggtaatggagtgctgtggctcacagttcttagtaattgtatttttcaccttgaaagccagggcattagaaaggcttatggctctgagagttagtgtgaactgcttggtctaccagcagttcgctgatggtctcagggaagtctggtatgtaaatattgaatcagcctacctgtgggtccttcctatcttggcctttacttttgtaccccttttcatcccacaaataggaaatgccaagaaaaagaatgtcagtcaaagaccccaaagagtaatgttgttggtggggaggaatgccttcaaaatgagatgtggatttggggaggttaaagggtgaactgggcatgagaaaaggggtgagttaaagacctggtattggaaagtgaaggagaaatatagaaaggatttggctaggaagtgcaggatataagggtttgagattcactaatcaagcagaaccacctgcttcgtgtctataagctgtgtgagcccactgcaggcaaggtgtctaaatggctagaagtggcttggccttaccaaatctgtttcttgataggagatcaataaatgctagctagcatgaatgataatggctgcgtcctgttccggcctgggcctccatgtcattgtgtgcccttgcataacaactttgctcctgagggttcttagcaattgaagggttcttagcaattgtgcatgaaacccacaatccaaaatacacaaggtcattattgatgcatgtagcaatagagaagagtcatggagttttagagccggaagaacatttacagctgatcatgcccaaatcccctcatgcaaatcaattaacaaaaattatatagccaaacattcaagtcgatgccctgtaattagtaactggagtttgaggtactcaacaaggtaataaagcccgttaacagccatcagacccactgagtctctctggcactatgagtgggttagcagctgctcactggatgcagctgttgaaaggaagaaaattctctctctctgaatgtgttgggctctgtccagcctgtgccattcacactcccatgtcctttcttagtaataattagtaaaatttccctcactggttttggagttggaggagaatcaaaacattgagggataaaccatcccaccccacttaggtatacatggtgtagccttaattgaaccagatatttactaaaaatgggttcatcttgccattcctgcaggttaagggcgaactcctggacatgacattgagaccagctccttggggctccaacctgcctttccggaatcctctccttccaatccctacctagtgctgcaggctccagggcttcttgtggatgtccaaccctctgtgtactctcgtgactttttttctgataggattatcaatcaggacaccttttcccccttagttgacctggtacacacctacccacccttcaaaggccagttcaattgtgacttgtcttcctctaaaatgtgaagaacattgatcacccctctgtccacaatgctttgtccgtacctccatgaaagtagctcttcagtgagctacatttaaaggagtagcagcctgtccacagtgctttgtccagacctgcattattctgtagggagttgcttatttatctacaagtgcttgcatcttaggttcttgattttctcccagcttaacctaaagcctggcatgatgtagttacctaataaatatctttgagtctgtggatggatggatgcttagagagatgtcctaaaaagttgctttccaggcttcatttttatataaatgtgagctctataagggcagaaagatctcttgttcactaaatgccccggcacctagaatggtacttagcacacaaaaggatttagtacatatttgttgaatgaataagtgaaacacaatagaatattttttctagatttgaactatatttaacaatataatatttacatataatattttataatatatatgattatgtaacatttaaatataaatatatgatatttaactataaatattacttttgctcataaacatgtttgatttggaaggaaacatctattagatctgtaatgactcttttcctcacagtgaatgggcatgttttttcatattcctcgggactgcttgcttattccacttccttctagtagcttcttttcattgatagctgggcaggaactcaactatttctccagtttaggagttggggaagctttaagagaatgtgagttttaggtgttgacttcagaaaaacgttcatttaaaatatgtgtttataacatttgctttcctgccactgcctttccgggtttatgattctccaccaggatatttggtggaatttgtatttgtttgttttttgtttttagtttgcatatagagaagctattgagctgcggagaatgaaatcgcactggaatttttcccaaactactctgactgacagcttcatggagaaaggggaacaacgattttccacaactctagagcacagtgggccctctttgtgatatgggcctggcgagtggcaagacaaaccatgtgctaatagtgaatgcaggaactagagggagggcagaatccagaatttaggttttttttccattggctttgccttgcatttgtcatagtgctctgcttccaggagacatttaataaatagctgctgaatttaaagtacatgcttgataagcttcgtattcaaaaagtatattagaggtcagatctttgaaacttttcgttttacaggtaaagacaatggtggccagagaagggaatattcagttcaaggtgtcacagatcaatagtagcaaaatcagaggtgtgcagttcttatcctgtgggatttaacatgcaggatatttagattgatatcatgagatgatttataatgggacactccagtattttgaacagatggatgagttgcagtatttcttatttgcctagtaagcttcatttggtacccaaaaattatgacttaataatgattaggagctttgttctagacatatctttccaaaagaaaaggagaaggtactgaagaacaaaggggaaagtttcatctattcactcagcctatttaggattacatattaagtgtacaacattgcgcttaatgtctagtggaagagcactgtatttagagcttagagttcagggtgtaggcctggctctattgcctaactactgtgtatcttacccaacttggagtttgtttggtgtctttctcataacatcaggcttggatgacatcacagaatacaaaaagctttcatctcatgtactatcaattggtagcaatgaaaagaaatctaaggctacattgggcatagagtaaaagagtgctattcatgatctattggtgatgtctgctctggatgatgggtaggaattacagcatgtgtgcaacttacttgctatcttgcgtcaggtaatccatgaagttccaatacctgtattctctttcttggtaaggtaagtctttgccttctaataatttaaaagctctgcagatatgcatagttctatttaaattaatttaaaaaatgaaagcaccaaagggcagctgacacaatgtaatgattacaaatgcccactgataagtagagaaatggcaattttcctcccagcacatttttttttcagaccattgccttaaacagaacaagagaaaagtatagtttcccctggtcaaactgctttccatatgttttgatgaggagtattaatccaaatccacaggtagaattctgcctgagttactacttagccgaaatgagtttagtcatctatgcctcatttcagcgaaaaccttgaatctttaaataagtcacatgaagtttaaaaatataagcaagagcctttttgtatattttggtctaggagacagatttaactccaatttgaaattgtgtttcattaggaatgttatcttttgagtatgggtttaaattaagattgttatacatactagtgttagcatagggagggctgaacaaggtcattaaatatagaccaaatgtatgagactgtctgtttgtatgtacatattatttgtgaatgttcatgtgtgtgcaaatgatggctctacagtgcttatttttaaactgtacactgtattttaaagaatggcaattgatgtagagctttataagcccaaagaggattaactgaaggaggccaataaatgcttcgcgtatggttttctgattgtgtatttcttctacttctaagaaatatggtggaacaccccttgtcatgtgtggcttattgttacacagaaccacaggctgttgaagatactatataagcttgggagttaatttataaggggtgttagtcctgtctctccacatagaaaggagtttaaccatgtgtagtactctttgaaaaccaatgatacttatcttaaaaaccatatgacattggagatggaaagctctgtgtttggttcttgcctcctgtttcactggaaaggtgaagctgtttgccattggactcagagttcatcatcacaccagtaattcttgactcccagtccgatatctgttctttccttaagtcaataataaagaaaatggaaaactgtctgaagtcacatggctatgaatgagacaaaatgggacttcttatccaataatttggccttccaagttgatgctttgaaagctgccctgaagttttctcctctggggtatcaggatgttttatcattatgacaatatgaaataaatagctattccagaatagtgctttccgttctgttgtggctacctggagctcctggctggagttcatatggaatctcaacagttctaatcatcatggggtcagggtattttctccctcccttcctcatagctgaattatggcacatcactcctttgctgtaagtttcttcagatcctttctggagggagataggaaaggcaataaataaataaataagaaggaaatgatttagagagaatagtgtcttcttaaccgctgaagtaacttcttttctagtagtggtggtggggttcttttgatgagaaacttgtctgatgagttcgttgtaggatagagtgaagtccttgggtatccagatttcaagatgaggtttctctgtagatgaagagagacaagaaagaccagagatggagctgctaggcacagagacatggaaagagactctctgatgggaactcccccgccatggctctgcagaccttcagtaacacgaacaatcacaataggtctgggattgttggatttctggtggaagctggcgaggaggctgccttttctgtaggagatagcacaggaacagagtcagctgaatggatgaagtctctaacacctggctcacatttgattacgtaagccacacctcagcatttggaatcctggaatgtagcttttgttcatttgtagaaggcatcatcaagaagaccgagcacattgtctgatgtgaagccccaacagagctgcagagggagcccccatcatgggtctatccgtagatgcagctgcccctcccttctgcagtccacacgctttttaggcagggtgtgtgcactccctttggttaatcaactttcatacctgggtagatttttgcctctgtaaaaggtcacctaggttacctttcccctcggcctagtcaggcttcatgatcccattctaatctaattttaaattaactgctgagtagatttataagaatttcataataatattggacatttggttagagaattatctgctccactttctaacatgaatgaattggccatgaaattgcaggagtgcaattaatgtcattaagcaattccttcccattctatttatgttgttctttatttttcaagggaggggtggtttaaattaatttattgattaggtattttattgctacttgataggagtggatctactgtttcatgccttgttgtttccagagactagagagagtctttctgatggtgagcggggtgatgccataacccgggtaaaagatcccttttgctgcctttgtagtctagtggaccatttaatatgtgggagagtgaaactacaggcagaattccggcaccatcttctgaatacttcatttggatgtaccttaggcacctgaatgccagcatccaactgaaacaaagctgtgttaaggaccatacctcctcttccaccctgatacccacctacctcctgcccacttcctgtttcccttccactctgagaccagcatctccttccacatcactgctgtggcctgatcctcaaaacttcagtggctcctcttttagccccatgttgccgctgatgtcactcagattccactgccagtcccttggctcacgccttcggcatcgatggattgatgtgacagcctcctcattggtctctttgttcccttcatgccattttccaccttactgccagaatgatccttctggaagcaaaacagtttctgtcaccctttgtttcaagtcccctagtggctctccataaccttcctgataaaatgcctatttcttaaggtaattctggatgaactatccttgttcctgccctgccaagtttctgcctgtttcctctgcatgatacacagtgaacaggttgggcttatacagtgaaggaggcaggtaaaaaaacctaaagatttcacacacacacacacacacacacacacacgcgtgtgcgcacgtgcctactgaccatcaacctttcttttaggactgaagtcatgggttaactccagctaggacacttgggcttagaaatgtgaagagtgtcacctggtcaagcaagcctcttgtttacttactcttcttcctacactccttttctagcggaagaagttactgatggacagctaactttctcctcaaataatttcatctttttttcctgcttccaacctatcttctatgaggtttggaaccaggacttccccagccagaatcagctagcttctagcaagggctggaagctctcatattccttcttcagagtcctattgcacctgttgggttacccacctctctcttcctggagggctggggagggagggtgagcctcacggtgcccaggcaacatggcttccagcaggaactggaagagccaagcctagtgggactggccaggcaccacagagggccaaagtcgtggctgtctggcatctgagctcctttaatgcccctttccacctttacggttctcttgggtggtggaaacgaccacggtgctgtgtggttcaaggcatgactagtggttgacgcatgcaaaggttctggggaataaaataagcccgaaaatggccagaatgcatgaggcatctgccaaaatctaacctattgtgatgtctggcccgcttggtgctctccaagcactcagaggtggcagaggaaatggaatccatttagttcccccgtgactgccccccaccatgaatagcctgaagagggttttcttgtgaaagcgtctgcttcaaccttctgtttctgtcccgtgttttattgtctcccctcctttgctgctgctattttactgcctctaccctgacaaagcaccaggtttattttctagctctgtgtgtctgcccgcttgggtgtctaaccaatgtatcagcctcagctaatacattagaatttgaataaatgtataacagcaggtagcaagtgactggtgacagggtgacatattgacttaatatcttgtgtaatgtgatatgaaggatgtgccttttggtgtgtattttcattttaattattttttgttgcttttcttaggcagacacttgtaggcagctttgagtaattgtctgaaatcattaacatgtttattaaataaggaagcagagtgcattatctagtgaatcaattatgtaaatgcacaaaaagcataagaaattagtctttaactgttgctgaactgcatccattttctaaattatagatgaaagttgctgtgtgtgcgtgtgtgtgtgtgtgtgtgtgtgtatgtgtatgtgtgttggggggaggaaggtatatttagattcatttccctttcttagagttttaaagcagcaacaattaatctgtgattttctttggtggggggcacttctgaaatacagcaactagtagggatttatgtagatttttcatgtagatgacaacagatggtcggcagtgagaaacagcaatttctattgaagggtctgggcgaagtgataaacagtgtcagtggagcagaagcaatagcatctttcctttggataacagcaacactatctaggggaaaaatcctcgacatatttttaaaccaacccatcatgcattctgattacttacgattaaaatattgtaaaaaggatttctgccattggctcaagtctaatttttggtggcattggttgttttcatttgggaaacaattccgttggatattgggaaactcaagctacctgctatctcataactcattagttaagtaaattgtcctgatgtttgagagaagcatccttcactttgtctccctattgcttttttgtctccaaattttgtgggtctctttctgtgggattcatataatgggccctaagataggtttccagtatatagcctggagtttagtgtttaaaaggaaaatgatggtgctgggatactgcccccttctcttggctgaacatatttcccctgatcgtttttctgatggcaattcaaagaggaagactgaggcagagattccacctcagtcttttgaattctcttttaggaaaagggttatgagtggattgaagtgtattcaaaaggagataacagaaagatgaagacaggcattttaggactatgtgaaattgtagctttctgagctagagaaagacatttctctgttactctttctcagtcttttcttctttataatggaaatcataccacttatttgaggttaccagtggttgcttacaaaatgttttggaagccaaaaggaaaataccctgggaggtaggagcatgttatcgaaggaagtacacatctagatgtagcctggactcccccacattcagttgtatgacagagcactggatacttaacctgtgtgcattctgtgtccatatctgtaaattgggaatgataagacgtaacttgcaggattgttgggattacattagataatgtattaaagtgcctattagtatagtaggcacacagtagtatatcagtagctcagttccctttccaaaagtgttaacaactgccaggatttgagttgaattggtgtagtttgctatgcataagataaatacatctagatttttaaaatctttgtacagatatcctgtatagagaagtaagtttatgacattgagtgtaagataatctagaagatattttagatatagtagtatggaaacaaaaaaaggcttcttttagatagaggcgtataccatcaagatatctttatagataggtatctcaaattcctgttcagatttcctttttgaccattaatatttttaaaaataacacatacagaataaaaaattcaatatactgtaaaaggatatacagcgaaacttatagtttcctatccttctttcacttccagacatactcccccaaagtagccaatgttaataactttagtgcatactttggatatacatgtgactctgtctatagaaacaattcctagaaatgtggtgctgggtcaaagggtgtatttcaaatttagaaagatctgccaaattttcctccaagagatcctagagtttcatattccactcaacagcattaagaatatcagtattaacaactctgttgccaaccatgttatctttgcttatctgataagagagatgatacttgttttgatttacattttgttatgaatggagtgagcatctttttgtatatggactagccattatttgcttttctgtttctatggactgcctcctactaacagtcatggcagctgtgctgagcttcccagatccctctgtaggacccaagttctcagtcctcagttgctgtgcatgtgggtagcagaaggaactcagccttcgctgaacacactcccctggccaagtcacgcccctttcctcggaataccctacatccaaaaactaaaaggctcagctccttttttaccagtttgggacaactctgaatggccatcgcagctcgagctgcccgtggaatcagctgaggtctctgttgtgatttcatcactgcctaacgtctctgaacagtcctggctcctttccttcctctgtgggtgttgatcctgagaatactccccaataaacctgcacatgactctccacctcctaaatctgcttcccagggagcccagtagaggacaataaccctacccatttttacacaaggttcttgttctttccttagagacttgaagggattctgtttaggagaaattagccttttatctaacatattagttgcagatacttttgcctctttgtcatttgcttttcactttgttgtggttttctttgcctttcagaaatttcgaatgcaatgtaaatttatcatttttttctttctcttttgattgatagcatttggtttttgttccttgcctaatagagcctcccttatgctaagattattgtttttctaatgttcctttgtttccgctaagatctttattttttacatttaaatatttgagccacctgagatttatttttatgtaagaagtgagagtggaaccagcattattttctccctactaactggccagttgtaccaacatatttattagacaatccaccattttcccacatctgaaatgtcaactttattatataacaaatgtttctatgtgcattatgtttatttctgaactattttttccctcagaagattgttggtttgctaataacaaactgttctaattccttagctttactgtatgtcttaatagccaatagagttaataaccttatatttcagaattttactggcaatgctcacaggttaatttctcaggtgcaatttagaattaacattccaagtttcaaaatactcttattgacatttttattggattcacattaaatttaggggagaatacatctttacaatgagtctttccatctaagtacaaagtctgtctttccattattttgccagcttttacatctctctgtaggatttaaaatttttttcttgtgaattctatacttttctaaatttatttttttaaatatatgcccattttgctcttaaaaatgatacctttcttctgtatatttaattggcttttgtttatataagctatttatgtgtactagctttataagcatctgccttctctcctaatgtatccatccattttcagttgatcctctttggcgttctaggtacatatatgtataatctgcaaaaataataattttgtctctttctaatttttattattcatgactttctcctcattgcactagtactaattagaaagtgtaaaattatagggtattggcaatgaccattcttgtcttaataggaatgcctcttagggtatcatttagtatgatttaggcttttgagctgatgcatgtgtatctatatctctctttcccatatcaaaaaatattcatggatttctattttattaagggcctattaaatcagaatggattttgattttgtcgaatgcttttttagcacccgtgaagatgattataggatctttctgctataatgtattgatattatgaatgacagaggtaaaagttctgttcttgaatgatcctggtatccctttaataagctctatttggtggtggtatcttattctattattgcactggtggattctgtctgctcatgtttgagttcatatttttacattattatttataaattagagtgatctgacttttctttctggttatttttgtcaggtttgaaatcagtgttatagctgttttggaaaaataacttaaaagttttctttcctgaaaacatatttaaatattttaatgggaaccagcatgaagcagcttgtctgttagtgtctttgtcagtgcttccctaaatatgtctttttagaggaacatatttgatgagttatagttaataattgtcaagattggactgtcttattcaaaatggaaaaggaagatgaaggggctaataggtatcttcctgaggaattgagagatgccagaggagcttggaaatatgccagcaagtgctcagaggaggtggggagctagagaattcagctgaaacactctgggaatccacagaaaaatcctagagatattcagggtaacaacaataaaaaaaaaaactttataaatggtctatattgcatgtagtttgaaattaagattgttactgttatattcacagagtgatcctctgacaaaatgtgaaagggtaactgctgtcttagttccttctgttcccttctttgtactttgttcagaggctttccccatatttaccctcctgtccctccccttttccacttagcccaggagccacctggaagcactcacctgctcaggcatcaggctctctttccccctcctgaacctaccctgagtgaggcagctctttgctaatgaggtgttagtccaatccaagctcacgtgaaagtttgtctctgtgcctcctgcagtcgacctgtttgtattttgcagggcgatttgaggatatttaaacccaaagcagtaggtaggggcctgccaggcaggcttgcgggaccttgctgtgtgcctgataaagccacactccccatttctcattctggctgttctgggtagggtcaatcttgtccttatgaaatcaagccgtagtactgtttgagcctcagcagtcttgtatctctgaagctgttgacgccttttctaaagtctttctgaggtttcttctccaatagatttctaaaatttttttaaaaatgcattattctggtttcttttttcctttctcatgctggtcagtgggattaaaatggatcattttgccacttttctagattttcttttgctctctgggtgtctctcgctagtcctaagcaattgtgttggattttataacagggcagaagattacataacatgtgtattggctttaaatcattccagtcacaaattgttctgataaatacttcattccaaattctacatcgattacaagcttaactgatcatgaaaaatttattctcagtaacataggttgaagaacctaatgtataagataaatctatgggatattgcattaaccccagaagtcaatattgcacctctttgtatggtctataaatatatctctgaaatatgcatacagtgttttgaaatgtagacagaactccttgatcagtttttggctttaaaaataaagaggatttttttgggtccaatttacacttttccgttgtgatactaacagataagggtactgcaaatagaatggaagttggtaggatttagggttctgaaaggaggtttcttgtgtgaaaaaacagcttttcttgacaagctgcttgtcaaggttttcaacagcctctcttttcatttatttatttggtttgagggagttaggaaggtgtttggtgtattttgtgctggcagctcacacgtcaacacaagactaaaaatattctccaaatatgaaggtacaatagtttcttcttttccccctgaccccccgccactgcccagagtaccagcgttaaaccctaggcaaagggctgacccctgataaaactgctgtaaggtcagctctgcgcctctgctatgaggtttttttttctcccatccatatctccacattgctattccttgctaaagttttggggtccccttgtagatctctagttcaccagtggctcccatagggatcagatcattcctcgtcacttctgtctgccattggaacgtatcttccctggttccattgctctggatcggggcattgttttggagttcaagcagataacaattaaaaagtgaggaagaagtcacatccgggtggcaacatcacagaatatatgttgaaggagatggcatttaaactgagtctttaaggatgagtagaattttggcgggggttattaatcaagcacacctacaggtgctggtatgttaagtatccctaccaggcaacataattccttaacctactttaaaagcacctgtatccagagctcttaatggaatcatggtattgctgaaaattttaggtaccgtgttgggccttctgcgtatacataaggcgagtgaagacagaacgaacttttcttcctctgtctttgcatttttggaagtgagcagacactggtaaaatgagaccattgacatgttgaagagaaatttttctctctcgaaaaataagttcaacattgtacattcagtgtactgtgaatgtatatgcacaccagtggttacatttatagcagtacaactgagaatgtgcaaatgaagtctgggaagtgccaaatggtgtcctccagcatctcacagaacttttctggtgtgagaggaacttccaatcaggtaacaattcctttcaatccaattcatttaactatatttttaaagaaaacccagggcaaggggctagaattttcagaaaatgaagctacaagcttttaggggtggacatctttttattttttcttgtgatttatttttgggttcttttctcctatcagatcttaaactcactctgtctctcctgccctggtgccagccacggaggcaggagtagtcgactctctcgatttcattaagaggttggtgagcaaggggttccgctgaagctctccctgcggaatcgagcacatcagcttctctgaagtgctctgctccccacagtgagaacgaagtcccttaaagccacagaagtactgttggactgccagtttaggtggcctctggtttaacttggtcacattttctcacctgcaaatccaaaagttgatgtattaagactcgccctccttttttatgtcccagtctttttgtgaattactttttattctttcattactttgttggtttgtttttgttttctaagaaagtaagcaagactttgggtcttttggggcaaaatgtcctgattcttctaatctatttagacaagtgtttcccagactgtgctccgtggaacgatggtgattggtgaggtagctgtagttgttctgtggaaaatatttctgtggtcagtttagtttggggagcactgcctgccctatcacccctttgttgcttctcagtgcatattagcattaaagatagagagttttgcagtttaaaaagaaacgtttttaactttttttttttttttagacggagtctcgctctgtcgcccaggctggagtgcagtggcgcgatcttggctcactgcaagctccgcctcctgggttcgtgccgttctcctgcctcagcctcccgagtacctgggactacaggcgcccgccaccacgcctggctaatttttgtatttctagtagagacggggtttcaccctgttagccaggatggtctcgatctcctgacctcgtggtccacccgcctcggcctcccaaagtgctgggattacaggcttgagccactgcgcccggcctgtgttttttttaaatttaatttatttttttattttattttatgcagtgtccctgtcatggcatttatctctgtttaggccagcatttgcagaacatttgtttttgcttagaatggctttttttccccctcagagcacctcttgatgtcccgaggggcacagacgttccacagaatgcagcctagactgtgcaggaaaaggccctccctgtatctctaggagcttctctatctatggggtacaagctttttgctgaggggtagcagtttgatctggaggcatggagggacttggatttcttgccatataaagactcacacatttttgtcaaagggcatccaaaaatcggtgctcaaaacaggcaaacattgcaactggagcattttcagagtggtcttcgtaaccctgggggagtaatgacggccaacatgaagcacttaggtttttatattgtatgaagtctgctctccgaatatttttgttcatacatcattcagcatacacgaaaccatctagctccatcccacgtctatgtgagtcactttttttaagtacttcttttttgaaaagtgtctcatgctcatagataattagagaaaaaaacaagtaaaaataaatcatgttgtttaatttaaaaacccaaatgaatcttaagaaccaaatacatatgtttctcactttcttggattaccaagaactaccacctttgttctcatcctattccaagcatgtgagttagtgttttttaccataaaaatgaatgatatggaaacagcatgtcaaaatagaggtgattttgtatttattcttcccaaatgactcaatataaagaaagcatggaaaagtctctggtaaccatatgctataggttaatggccccctgtatgtctctttccagggtaagtatgttttcctggtggacaataactttccaatttatatgtttctctttcaagattgttacccaggaaatgggatgtttgaagttattcattattgttgagtgaatttactgattgtgtgatagttatgtcagaattggtaacctgttattacctattatttcatcattaaatttaatgcataaaatgtgtaattttatagccctccattactgttaatttaatgtaatgcaaattgattgttcagcaagagtggcactcatctaagcacatgttttaaatttcaaaatgctaaatgcactttagctgtgttctgagcccaagaggaggtgtgtttgtggctctggagaacatctgtgttaggaacggcccagcacagtggcacagctctgtgactgctgctgcaagctgatgccacttttaactgcaggttcagtgaggccatgggcacgtgctgccaggaaagagggcattttacaaatggggataagtgtgtgcattatactaattttgtaggaagaacttaaggtctgttcctttaagaaagttaatgttcaaaaacacaaaaggcagttgagccacagtctccaggtttgggccactttgggcgccagagagaaaatgaaagttagagctataactgctgttgctgatattgtctgtattgtatgagctacagagggagtgaatgatgaagagcctggagagaaataaaacatgttggagtttgtagtcttcaaaggataactttagaataaacagagctagatttggttaggatcttatttttcatttacatgttggtcatgtttattttggtctggagagagaactctgccaccctggacacccttgcttttttctttctttctttctttctttctttctttctttctttctttctttctttctttctttctttctttctttctttctttcttttttatttattttttagaggggactcttatcagctttggtctccagtcattggatgctggaccttctcttcttggaatgagtggatgccaaaagagcaaattccaggaaatatcttatgtaaagctgaggccatcttgactttggactcaaaataaaggtgatattcatgagccttattttaagaccataaatgttaggaagagatggtgtcctgtagaggaaggcactgtgaacaaagtttcaaatgctttgccgtggaatgtgttataattgccatcattatgattagcatcctcacttcaagccttgagttggttcatgagtcccagtaactctgaattatactgattgaaacccttcgttctgaaggacagctctttcgactgcgtctccacttcttgtttctttacgagaaataaaatcccttttcttccccagttctgtcttgtggtaacatgtgctcatgtgttttgtctcattgtagtctattgcatttctttctttaatgaaaaaaatagtaactaccctttaaaagaaaaaaaggacttaaatgattttgcttgagttgttgataataactgtagatgagactccaaacatttgatactggctacaaatttgtttaactatgaacttcagcaccactaaaatggacccaactctagcatcacacgtaacaactggataacagtgcctgtcagcatcacataactgtttaagaaacaaaatggggggaaatggtatataggaggataatttaggtagtataagaagaaattctcacatggtcttgtggacaaatctttcagatgggagggtgggtggtaatatttgggtgggggagggaaggccagcttctgtgcttctatggccaggaactcttccaccccctttcaagaagagtggaaaataaatctggaagcggcacactaaatttaaaccagggtcgatacctaaaaaggaagacaagtgataaacaaagatgttcaaacaaataccacctggacatcttggtaacctattatcttgaacgtttgatgagctggaagcttttatttcccctcacagctttccattttcattttcttcatcttagcctatatacagctatgggttagttttactagtgtttcaaaggtggcagcaagttggctagttgggtcaagatgttaggcacttatttggctctctcttgtttaatgtgagaccatgtgtggtttggctgtcagtgatgctcggtgtctgttagattttccaatgggctagcttatcatatctacctacctcttagttcaccacccctgcttctagcagtcctgctctctgcttccctggtacccggcaaaagcagctctgcagggggataaggatgtactggaatcttgtagccgcatggttttaggatttggtgatagttgtggttttttttttttttttttttgatgtggaaatacaagtttctaacattacaaatgtgagaatagcatcaaagtgtgagaaaaactatcacacttagatattattctaacactttgggaaacaaaataggctttattggtagtttgtgtctgcacttgctgtaagtagaatagatactattagttttccaaagttatggtaggaacacataatacaaaagttttgttaaagcaaacatttatttttaaatttatttattattattattttgagacagagtctctctctgtagcgcaggctggagtgtggtggcataatcatggctcactgcagcctccacctcctgtgttcaagtgtttctcatgcctcagcctcccaggtagttgggactgcaggcacgtaccaccacgcttggctaatttttatggatttttttttttttttttttttttttagtaagagatggggtttcaccatgttggctaggctggttttgaactcctggcctcaagcgatctgcctgccttagcctcccagagtgctgggattacaggcatgagccactgctatttttttgcttgaaatctctcaggacagtggtatgttggacaggggtttgcttgaaatctctcaggatagtggcatggaagtggcctggaagggtattttttggcttgaaatctctcaggatagtggtatattggacagggtctatgattctataggcggtagtaagtaaaagattggggagtgagtgagtgacccactgaagaaggaaactgcccacccttccaaaggcccatagaactctgaagagtctcaaagtgtggtcacacctgtcagatgcttgcttgtgtcatgtatactgcgccaaggacaaccagaacaaggtctaaggtttgaacattgtggtgtgcatttcatcatctagaatgtgattttataagcacatttgtgtttgaataaatcaacattggaccattgcatagttttgtattattattcctacccaaggggttgagaataggaattcttgcagcatttttaatgggttaatagtaaaggctaatacttattgagtgcctcctctgttcctggcaccctcctcaatgttttccagggattctttgctcctgccttgcagagtttatgagatgctgttagaacctctggccttgtaaatgaggcaccgaggcacagaaccttacatagggagctggtattcacagcccagcagcagtctgcagagcccatgctctttgttgttactggactagatgttcttaagtgggaaagggaatctttttaaaatcaaactgatgaggaaactttccttagtgtatgaacactctagatcatcaataagccggcagaccattctgcactttcaggctggcttggccaagccaattcttagactctgagggagggacataaagtttcattgagccataaatggctaaatcagggtgctcatcctgagtcccaaataacagttctgagggcaaaggaaggaaacccagggctgttcacatagtaaattgtggttccagaaatcagtgacctacctgcttgagtctgcaagaaatcagacatatagtaaaagaaaccagacagtgatttcaacaaacaaacttggcctctcctttcagttgtgttttggcaagatgttcatgagcctttgccttcctgtggaagaatttaagtgtattttgctacagttaaagatttattttcattgagcctgatgatgcagtaggaagaagggtaggcgttagaaaaggtaagggggtggcatcatagcaaatgttcccagattcctggaactaaaaagaaaccttaagtataatgccacagcacccagtcaatttcaagaaaggactggtttatctcaggttggaggagaacagagaaggtaagttcatggggtgaatgtagtcgtggccccagagtacctccattcgagccaacaaaacttttgtctgtctgggccctccttggccatcccgacttgtgactcaccctttcccctgggcttgcctgacattagagtcagcggacctcattctctgatcagccatcagccctcaactctccgggtttctttatcctcatagatgcttctccagattctttttactttgggtcatttttggtttcgtttgttttgttttcataaggtggttatgtaaccttgcggaaagggtaaatgtaatttattttactgttactccaatcattaccttaagtcttctgagagttctgccatgcacattgtgactattccatggttacaaggctcaggaagatgcaaagaagaatggctttctctttacacccccacagggcattagcagttaccatgcagaacattatatatattacctgatcgatattactttatatgcataatttgaaaagtatttccttaaaaaacagggcaagtttttttttttggtggggggataatgaacaaaatgtttccctttataccttttctagtatgatacattttctagtatttacagttttacttttagagagttaccttttgaagcatacttagttactgttaaactattctgttcccgtagttggatgaagctaataaaaaagcaggctatttttattaaccgccagatttcacaacagtcgagtgttccattttgatacaaagagatatatagccggatttattcagcagttctttatatttataaaagtgtcaacagtgaaaacagcatacatttatacaggtcaatcatataaatgtaccaagcaaatggtggtaccaaatttatgggctgcgtttcccctgccagcagtatagtttaaccttatttatagaatagtaggtaaagttggtgtttgttctttcagctgtttgcatttctgacagcaggactgttacagcagacttagaatctgtgtaaaagctgaaggaaattctatttatgtttataattgctaaagaacaaaccctaagttattgcacttcatttttttacaactggaattatagcatattgaaatctacattttcattatttatcttttgaccttacttattaaagtatcttgtgattactataaaaataatattgaaaagaaggataaaagtcttttatccttttatccggaactgggatatgtaatgcctataaaatcgggtcaagggtaattatactttaccgtgaaaaaactttgtaaacagcaagaacaatcgagctgtaagacactttgttgaattgtctttgttttgtcttgatggaggtcatggtttatcaatcattcaaacatccgttaagataaaaaaaaaacctaataattttcctgttgacatgtatatatgctagcatttaatgtggttaaactttgaggaaattaaaacaaattgaattcatttttctggaatgatactgtttctgtaaacccctagattacatgcatttcaatgaatttctacttccattttataccaggaatagatagattagtgagcaaattcctccttttttaaaagacttgaatgcaaatctgatttctattttaaaaagagagagggagggagggaaggagaaagtgagggaggcaatggagaatgccccaaggggcatgaattctacccataagttccatctccactagtaatcagggttacagcatctacccccagttccaattcagtgctgttttttccaagtgaagtttttcctatttgccaagtatgaaattttaccaaaaaaaggagaaatgacttgcttagagttacacatccgtttggtggcagaactggagtccagtttcatttttctcactcctgccctactccttccccagccctgcccacgttggaatttctgctcagtatgtttttccactgtaccaaattgagctccgatgttggcacattgcctttcatttcatattaaatgagtgaatacattaaaagtgcttaaagcactgtctaacggatagtcagtagtgtagcacatgttctattaataacattattacttctatagcatgagtaactagatcccagttcctccagttttccagtggatggccaaagtcccctataatttccctcagtctttccccaggaagtcctcagtccccactcaccccaacccaggagtagctccaaagagcctgcagctgtgtcctctagagaaatgctggagtcaccttgctccagcaaatgctgctgaaatctgctagaagtctctgatgaaagagtctagatttattttctacagacaattcaaaacttttaaaacatggatttatttattaacagataaatacacaaagagtgaaagcattttgctgaatcacaagtgggatgaggccacctagagagttagtgacatagatcctggtaaaagcacatggtcaggaatgttagtgaccatcaagtttacacccagtgttcaaaagtggtgtgacctggttggccaaccatagcacgctaatccttcccactcttgagtgacttgggttttgcctcactggatattacagagggctgagtagtaggtgcatcgtctgaactgtacacgtgtactgaagttatttatatgcatataatattggttagacttatatttggagtcaggagacctgggcttcaccactattgatgaattgtttttaaaacttggctgggtctcagtgataccaggagtaattgtgaagatagatgctcaccttctcttctttatttcttcttgaagccctatgttttttaaatgtgattcccattttattatgaacattttgaaatgtgcagaaaagttgaaagaactgtttagggaacacccattctagagtggattttaatagtagtaatgctaccaacaactaccatgtaccaagtacttctgctccaagtactgtgctaaatcatttacctgtgtttttctcatttaatcctttaagtgaccttatatctagatatacttatctccattttatggaggaggaaattaagccccaaatatattaattacttactcaatactttagctatcaaatggcgaaacacagtttgaactcatatctataaattctgaattctaagcagaccttcctgccaaaacatctcacactgcgaaaggcagtgcgtccacaaagcattcacttggttcttccattttcatagaatcaaaacctataaagcccaccataaaatatcatcttttcagatattttctttcctgagcctttgtttttttccacatgtgaaatgagagggttgtggaagattttgaagtctttggctctgagatcatgtagagccaactcccagcatcagaaatcagatgtgtacatttatctcatcccttccaaaacaaatatgagttgtgtccattttatagatgaaataaccagtaaattattatgctaatattataactaatatattatttcttttcagagcaatggaaagatattcattaggcactcatgacccaagaggtgtctaatgatactgtcatctctccttctctccattccctttctgctttcttcctgtttttcttcttcctttttgataaggaaaggagacactatcagggtgcagccatgcagagcagtttggagtttataagcagtaatcttatacacctttcatttcttgttgtttgtaaacactctgaggaaatggaatacattggaaaccctgtttactgaatgtgtgttggtctttttgattaagaaaggtgggggaaagtggggatctgcctccttgttcctcttttcccagttctgcatctctttcagttgcaggcagatctcaagatcagaagattaagacaggaaaccagggagatggaagcattgtccttctctttttaaattccttgtgaagccctggtagggttagcagagtgcccggaatttctgatcctttgactgaactgtcattcattagaacccaagctttaaactctaccatttaaaacagtatcacattttttattgcaaattatacataacataaaatttaccatttaaaaaggtaccaggcattggctttaagtacattcacagtgtgcaaccatcaccactatctagttccagaaccttttcatccccccgagcagaaaccctgtacccattaagcgatcatcccccataacctcctctccttagtccctggaaaccactaatctaccttctgtctctgtatatttgccttttctagatattccgtataaatggaatcattacaatatgtggcctgttatgtctggcttctttcacttaacacaatgttttcaagaaaacattgccattttaaatcgccaggtattttactatttcttttttttatccctctcgaatcacaaatggcacccaattttttagccttttgaaataccttctgtaacatatagagaaggaaaatatctagaattggggaagatatctagaaataggagatcaaatgaagagtagacatatttccataatgacttgtaaaactgccaaatgcagagtttgattttctgcccagctggaaagtcatttagtgttaacgagacatgtgaattcttaaattattcatttttaaaaattattttcagctattttaattcatgacactagttattattttgtaaagggttaagggcactcgtagaagggagtgggcccaaggcaggcacgtggtgccacggccagtgtctcttcttgggtcccatgtaaatgagcgtgcaggaccaggttggttgctctcattcctggggccatcgtgtgctgattgactttgcttagcacttgactcttgtctcaggatgcattgccaatatttggttgtgttctgagacactagatcctttgtgatctgcttttactcccctggaggaaattcaggagttatttccccttccctgacagatatcacagcattcatatgtgtccctggcagttggaaccagagaaagaacatttcaacccttccgtaaagctggaaaaaccatgggaatatatgtgacaacatcgattgcacaccccaggatttctctctccccgtatccctgagttatctaacgtaatcaacagcgtcataggtctgtgctcatggtatctgtaattatattcatttgtgtggatgcccagggaattccagtgactggccctgtaagtggttaactgcaaacaggagcctgctggaattacagcatcatttgagatcctgcacatttcatgtgactgattttaagtttatatactgtttagattttttttttctttctgtatttgcagtttaaaaaataaaggtaagctaataattctccggtcaatttgctgtttttttctagtgctttaaaagtatacccttgcagaaacacactcacacacagacacacacacacacacacacgtgtgcatacacacacacagcaattatgatatagggaaaatatacaaatcattccaacttaagtagaaatgataaataagctgactcttgaaattatgtttcagtgtgaaaccaaaagcattttccctccctttctccttcccttgtttttttcctccagatttaaaatcctatgggtaagcctcttctactggactgcataattaggtagattaattagcacctgtcctatagctgtaagaagctgatgcatacagtgtggcctcatagtctatgccagaccacttaaaaagaaactgtgggggtccggtggctggcctttagacattttcataaattaaaaatattgagagccagcccaggtactgcaccctcaccggagaactggacgggtgaatggagttgtgctgggtgatctgtctggatggcccgtgttaatgatgacaaatgagctcaaggacaactattgaaaaatattggaagcctgagttctgctgttgaaatgttctgtcaaattaaagaaaatcaacttaaatgccagcagcacaaatcttctagaaggcaactgaaaggaaactccagaatcgtcagacatgatgcatacttggtgttgattgccattcatttcgtttgtgcatcatgttgtaagaaaacaaagctttgggtagaggggatgtgactgcccattgctttggagatctgtttgccagacatttcaagtcagagatataacgtacagtttgaacaaagagccgaaaaggtgtgaacatcacatgtggacctttttttgtggctccgtttcctaacctcacacagattccatctcttgaatcccaccagtttaaatgctgtgtttaatttgtttaatagtctgcatgaggaagatttaatattccttgcatgtcattctccaaagcaaattggtaatagtattattaaacttactccatgatgagacataaattgagtcctttccactcagagaaaaactgccaagcattgtttaacacacactcaaggtcagggggcacagtcagaagtacacgtggaagcagtttgaagactgtgacacactgcctttcagagaaggtcccctgctggatctttcctgggtaggtgtctaatatagtaatatatttataattggattttaattgcaatctgattttagtgtgtgtgtgtttcagtttgctgctaccagaaggatgaggctccaaatgaaattatacaatacctctcccagggcaatttgttctccgccaaaaatatattggaagaataaaatgcatgcagtgttgtttgccttagtttattgacttaacaacctaagttgctttcctctttggtgttttatcttgctttgtggtgcactccagcggcatggaatggtggagagagcgtgggctgatcgcaggctcatggagttccaatagggaggtcctgtgtaagttacttaaacactttaaatttccattttctcttctgtaaaatggagatagtgatatttatcaggtgtatgtgggagagtgttttgatgttcaaacaagataagacgtgaatattctatctggcatctacaataggaggtgaaaaaaccagtagcttgttaattacaactctttgaaaatagatagtttccttatttcatactcttcactgtccctatacagtagtcattttttaaaaagcaaggagggggaatgaagtgatgttggtcaaagggtatagaattttagttaggatgaataagttctggatgtcatacaatgaagtgactatagtaaataatttattataaacttgaaaattgctaagacagtagattttaaatgttctcagtacaaaaaaaggtgtgtaagttgatggatatgttgattagctggatttaatcatttcaccatgtgtacatatatcaaaatatcaggttgtatacacattgtgcatatattataaacacatacaatttttgtgtgtcagttaggctgtaataaagctggaggggaaaagacatctgagagcctttgatgattttagggtgtggagactctatgtctggctgtcaactggagggctgcttatgttagccaagcctggttccttgtagccccagaggaggagctttttaaagaaaagtgaccagaattcttcccattgctccttacacagctgcgaaactataatttaatgtaatacaagatttcaaaaagatcacaacattaatacttatgtcaattggtatcatagcacagcttcccaacatgaaattttgcttttctggatcctatgccaccattcctgtggcaatacaatcctgctcacaggaaatgtgatggtttttcactaccttttagccaattgattttttaagaatgtgctaatggaaccgattttattcaaatcaaaagcatttgatattagggctttggtggaaaataggacttttaagtgtattcctgttgacccttctgatttggaactgggaggagaaaagaggaaggacagaacaagaaaattcttgctaaacagaggaatcagaagcattgtcaatttttaaaaagaattagttcatagggaaataattgaaatggtataataaagttacttttgtaatccaatttttgcaaaaaggaatatttgggatcaaataataacatattcattgtgatctaacgaacaatctgatatactgtataactgaaataagcatgaattccacgaaatttgttggctctttgtgcccacttgtttcacaccactgtgctctttttgtcgggttagtggaatagacatattttgtaatctaatagtatcaataaagaaattaactgctcttgatagcaacagcccccaagtttataatttgataacacctttctacctgagataacaaggataatacccaaacaccataagattccataaacatgtgtagggcattcagtgtcacgttttttagtatccttatcccttttgccctcacaagatgcactttttacaataatacgatagttggcttttggtatgaatactagtgttaatagatgtaaaatatgacatttagtggaccaaaaaggtacagttttatattttataggcaatttattttcatcaccaccaacattgcaatcacagaaaaggttgatgatgaacatttttaaatttgaaaaaatccaattgatcccctccctttccaaacacacactttttcttttgcgtttttgcaggggtggaataagaatgggttgtataaggaaagatcatgttaatgcctgccatggattagatgctggaaataagacccaaagattataatggaataaaaaggggattacagtgatagagtcatgtgaggtcagagtggaaggttagcaatcagctagtgaagtgtgatcttcttatcagatggagaaactgaggctcagagaggggttcagtctttgagtactcagagttacaaggctccttagtaacagagcctgggttttaaagtcttattgatagaggttttattgctcccaggcaggatttgaaaagcaaaggaattgaggaaaagttatgctgggaaaaaaataaaacaagattaaaaaatagttaaataaatatagacaaggcattgcttttaaagaatgacctacatcggaaactaaagggttattcttctcttgggattctctggctagaaagccatgttccagtgcgtccctcttgctgttggtctcctgagcttcctgatgagaagcaacacttgtgagactccacactctgctctcagaggggcagagagggtgctgaatcggcatcaaacgcttcaggagcctcccccgctgcctccaactgcatccattttgttcctgcctggaggtagaccgcagtcgggatccaaatatataggaaacaaaacctaccagcatgaattattataagctgtacccactagaatataaaaatagtattttcctgatgtttgcattatccctgagccccgataagggaattgcttaaaggaaaagcagccaacacctaaatggcaggggtgccaggctgcataatgggctaagaggtaggaggctgacctcaggaagcagcaagggaaatctgctttgaagggaatcagcagagctggcattgtgctaggtgctggcgggtaaggaaccttctcacaggcctccagtggctgttcgcatgtatgttttgaagtctgaggcctgataaacattttatttagtaggataagcgagacttcgaggattttgcagcaggctgaagtgaattgctccggtgttctcaccagcatcctacccagaggtgtcaagtacctggaatggttggccccagcatgtaggaagtagacagaagggtcatgcccttccctcttatttcccaggtatggacatggaggttagggagacatttcaggtcagaggccggctgggaaatctggcttaggcctctgctggagctgtgcttctcaaacttgcctgcatgttagaatctcctggaagacggggaagggacagttaaaaaatcccagtgcccatgccacaccccagaccaattatattagaatctccaaagggctgtggagcccaagcatcaacattttttaagcctacctcggtgtttccagtgtgcatctagaaccagtgggtgagaacattcccaatttgcagatagttttatatgaagaattttttgaggattgtttgttttgggacacgtgaaactcctcaggggctcttcatgtgccccctaatatggattagacacctggtttagcccagggcagggaacacatcctgcccttacattatcttgggcagtgtatttgcaagctttagctgctcagttttgatatatgttggtctgtgagtgaatgaacgaagccgtttcccatccccttccctgctcccccctcgcctcattggcagttaactcagcctctggtgtattaagaaaaatcctcactgcttatgtagggtgcaccccctacccaccgccctgagaacagggcagagctgagacagaagagtgagtgacaccccaggaaagcagcttcatcatgagtcgattaaaaccccagcctcctgacctccaatcataagttcctggccctgggaaatagctctctaatgggctctgggcgataaagcaacaaggttgaaattgaggttacattaaagcctaattttcttatgaggaaaaatgtacaaatgaatatgaaagtgatgtacctttgtaatctagcttcttgcctgtgcccaaacatccttagccttttgtctcaattttctcagtacagcatgtgcctgaagctgcccgaatatattttactcagtaatgcacaggcaagaagccttatctggggtgtgggcagagaggatggcgtagcttacatttagagcaaatcaggacaaatggagcctggtacagatgtggacgttagcatgctagccacacacttggcacaggcaatttctggataccagagagggattccagacacctgtcttaaaaagatccaccccttactagctgtgtaagcttagggaaaaaaaaattactgattctcttagcctcaattttttcatctgaaaaaaagtgatatcctccgtagggtatttatgagatcatatctgagaaagggctttaaacgttatacagccatatataaaatgtaaattacggctttactagacccagttctgccatgaagtcagtgtaacctcaggcaagtcacttcactgccctgagtcttcttttcctcatttttaaaattgagaatttggaggagacactttaaaatatattccagctgcataggtcttgtgtctggattcttagaaaagaccgttggtgtgcagttttccaaaactgccccttttcaaatgcttcccttagttctcagtcttctccacaatagaagagagccctctctgttatccattgtgagattttagaaatagaacggggagtgaagaaataatgtggaataatgtcttcccgaacttttcagctcaaacagcagagcctggcttaagaaagaaagaagttctctcaatgtaaagaactgctgagatgccatccggaaatgctgtttactctcctgcaaagagcagagaggtgatccagaaataccaagtgaatatttttcctcttacatacagttcttatttccctggtgtttctaagcagtattagcctttatccttaagcaacccatcttatattgtccaggatttcatatacactagatgacattattctactatcacttttaatgctgcagtaattttcataacctgcagtatgtatatggatccttattataacttctacttgggcccttttttttttttataggaagtcattttttttttttcttttggcagttacattgctaagggctttgaggatttccttaatgccatcactggatgggtgtgtgttctgaattgtcattttctgcttttgtgcagtttctcctgttcctatgagcttcgttacctgctcatgaagaatatgagtctttggaagtctggattgcaggcagctccagcgatgcccagagtcttgttaggagggcatttcttcttgccctcgccatgacagatttgagatcctggtgcagactgaagctgaaacgaattgctgagatgagaccccaaagacaaagagacgtgcaagtagctaagggtttcaaggggcagtttaatcattgctgacttcaggcttcctgctttgcagaaattctttctgtagcagcaaaagcttctttttaaagaagttgttagagcttgagttagatatggtggtgggctacaaaagtcatttgatgatatttagtaattcccttaaggaaagatacttggatctcttcggagacatatgcatccctccactgcagacagccacccagttccacttcctgctagctctgtgccgttgagcaagacagtgacctctctgagccttaatgtcctcatctgtaaaatagtattgctataacttagtctgcgttatggagtggtggtaaggatcagaagtaaggcttaattggctgggcatggtggcccacgtctgtaaccccagcactttgggaggctgaggcgggtggttcacctgaggtcaggagtttgagaccagcctggccaacatggtgaaaccccgtctctaccaaaaatacaaaaaaattagccgggtgtggtggcaggcgcctgtaatcccagctactggggaagctgagacaggagaatcgcttgaacctgggaggcggaggttgcagtgagccgagatcacaccactgcactccatcctgggagacaaagcgagactcgatctcaaaaaaaaaataataaaaaaagaaataaggcttgatttttaacctcaataaattttagttgtttttgttaatttctccgtagtatatagtggaatctaaggctttgattcatgtttaaaaatatgtgtcctttgaagtagggtatgtttttttttttttttttttgagacagagtcttgctctatcactcaggttggagtgcagtggtgcaatctgggctcactgcaagctccgcctcccgggttaacgccgttctcctgcctcagcctcccgagtagctgggactacaggtacctgccaccacacctggctaattttttttgcatttttagtagagacggggtttcatcgtgttagccagggtggtctcgatctcctgaagttgtgatccgcccgcctcggcctcccaaagtgctgggattacaggcgtgagccaccgtgcccagccaggtatgtttttttaaaattcctcctttggaacaatggtcttcagctctgcttgcatatcagacctttggaacaatggtcttcagctctgcttgcatatcagattctgatttgattggtctgggttgaagcataaggattagtattttaatttcattgaggtgtgatttaagccagtaaaggatgcaaatcttaagtatatggcctaataaatttttacatagaaatacatctgtctagccaccacccatatcaaaatataggacatgtggcatctgtatttactctccagatgattctaatgggcagccagggctgagaaccacagcccaagcagacggtcatccacattagatctgacactggcttttcttttgtcttcaaaacgtactgtgtgtttttatccctgtgcactcatgttctcctttaccatcatctctgtttcacaaaactcctccccgcctcacctgttgccactagcatttgcacacttctcttttgttgccctcaaccccttgtactgtacagtgagtgggtgggcatctgcctcctccacagatctatgagcttctccagcacaaagactggatttcactggaatttcatgtccccagggatgccacactaagcatgcataaaataaatgagtcaactctggtatactccagctgtcctgctgccatttgcctcatccacaagaataactgtggttggggacagggaaggagtatagctaagtcagattttttattgtggccctcaaggccaacctggggagccctactggaggaagccctgaaggatagttgccccgatgaccggttatggtggcctgcaatcccagcattttggggggccatgacaggcaggtggcttgagtacaggtgttccagaccagcctaggcaacatgacaaaaccctgtctctggggggaaaaaataaaatgtatatatatatatttgtgtgtatatatatatttgtgtgtgtgtatatatatatatatagtgtgtgtatatatatatatatatacatatacaaaaaaaaatttaaaaccttaggcaggcacggtggtacatgcctgtgatcccagctactcaggaggctgatgtgggagaattgcttgagcccagaagtggaggttgcagtgagccaagattgcaccactgtactccagcctgggtgacaaagcgagaccctgcctcaagaaacgaaacaaaccaaaaaagcgaaagttgcccctgaaaatatctctgggaagcggtcctccctctggataagctgagtgcttgttcctgcaccttggctcacacgactgctccatggcgccccccccccccttctgttaactgcatcttcccgacttcaacacccagctcatgctgtcatctcatgttcatcttccaaaaactccgaccctcacgcattccttttttattttctttttgtttcctttttgcgcttgatgtcagtattataggtcgcccagtacatggtagtcagggccatctttgtttcacatgacaagaggaactcagccttaacacctgctctgtctgccttggaaaagaaatgaagaaaatactcgtttcaaaaaacagttgggagttttaaatgtggattttatttcctttctgacttgtttttatgaaggaaaaaaaaaatcattcctcctccctatttggcaggggtagcgtcacccttgaggagagtgtcacagaaggaaaacgcgatcccccaccattgccgtccggctccaggttcctgagctgctctctctcacctctggctgagacttttttttctctttcccctagccatctttcttaactctcggggccccgtgcctaaatgacctgatctgtgaaatggagatatatagtcctttcattttaagtcctctatacatacaaataagagtgagaaaatctgctgaaactgaattttttaaaaccctcttccaaatcatgtttggttgttttccttaataaccagagatgcaaaagaactcactcattatgctgtagcttttctatttctcaccatggaaaataatcccagtacagctcttttgtgctttagttcacagggcctttaccgggctttatcttacgagagcctcacaagcgccctgtcaagccgagagacagggcaggcctgaaggctcagttgaggaatcaccttccttaagaaaacttgaaaccctgacattcccccacccctaccctctttcctttccaatactctctgtatatctgtattaatgttcccaccacactgtaggaatatctgtttgcatggctgtttcttcccctacactatgggctctttgaggatagagaccatatctagcatttctctgtaactaatgcccagcacagtaccttggtgtcaaaccgaatacgcctttgttgaataaatgtatgagtcaatgaatgaggttgcagagttatcaagtggaggagggattagaacccaggtatcttgagcccaagcaatttgaaggtgtttaagctaattcttttgtatgtttttctggctgtttatgtacttttgaagtctttatctttctgtgttaaaatatgtctatcgttattgcattttacagcatcaaaaattaagaatacttacattcttctacaaattgatgcttcaaaatagaaaatttggaatttcagaagctccagtacagtaactaatctgaaattattgatgcattttctttcgtcagggaataactttgaaagattcaaatgatttcaaaatccaactttctaacgtctgggagagaattcctcaaacacatttagcagtcaaaacaattctatagagtataaaagatgaagcatggcacttcgaagtaaaggttacagtttctataaatgagaaaaggccgaatatttgctagcaaaatatttttagcaggaaagaatttactttgggaggtacttaggcatgttatattaatactaatgtacaagttcagcaatttgtaggagtggaaagaattggattaaagtaaaaagttcttaatatctacacattaaaatggagaaaagtctgtgaatgtgaacttaatcaaatcatggtagataaacaattataagaacagaatctttgaatgatttttttttggatttacttactaacattagcagaatctttgtgccttgcaatcctggagagttttgttttaatcagatttgttggctgaggcagtttatgttaaaaaaaaaaaaaaaagtaacttttaacatccagctgcttttctgagaattacccatctatgaaaaaaaatgtagcaccattaacatttatgagaaacagacttaacattatcataaattatacagtaaactctcttggactgggattgaaaggtgtgtgtttgtctttgaagctgatgtattttgacagcacaccaggaggcagctcactctgaataatgggcaagatgagagcctcagaggaaagaaatcactcccttaagtgagcgtaaaccagatagggggtaaatgaacttccccacctggacacattgcaattttagaagcactgatcacacgagaagttagcgctagcagggacctaggagccatttagttatattttttctatttacaaatgtggaatctgaggctcagaaaaaagaaaaaaaaattctctcagcttcttccagtatttcaggggtagagccaggaacagaactcacccagcacccagttcacctctctcagagcctgaggaaagctcgtcaatgttttcagtctttgcttcttcctccgtaaaatgagcatatcatttgagcttcatgccctctccaatttgaaagtgtcacatttcaatggcatttgtaatcatctgggtaagttctttatttcactaccttgttgaatcagtcacctcaaaggaatggccgcttggtccaggaatggggtatccggtgataggtgaatatgttgtgaggtgcttaggggaagaggaaatgtgggggtctttaactgctgttctcttatttgtagggtagcaataggttgtactgtaggccagtggtatacatagccaagccctatactgttttgtctaaaaccctaaaatcctaaaactgggctgacggttgggcagtaggtctgataatttgctcaggagtcatctcttggttgagcctaatttactaatttgcattcctatattcaccgtcttcattccaatgccatctgtaccacacctgaatgattactccattttcatagctagtctccctgctgtcccaattcatcttgcccctcactgctaaaatggttcatcctgcgtcaagaacagtggtgttttttgtttgtttgtttgtttttttaagtgctgaaggatcaacagtgggttcctatgggacacctttacattgcctggtctacagtgtttcactaatggtggatctttgacactgagtcacctatccaattcatcttgtcccctagacacagctcacttttttctgccctacccacgtagctttcctctctgccagtgcgaaacacagctcatgactcacctcctaaaggaagccctctggagctgagcctcctcttgttcattacatcatggcttttgggccctttgggacctccttgtagaataattactggatcatttagttctggtgcccacattgttgatccccgcttggttcagaaaaattgtgatgctgaaatggatccttccttctcagggctttttggagacagcttgagtcccccaaaccatgtggtaccgtaactgaggcattttccttcccagggtacttctccgggaaggcagtcttttggagactggtaccttatgagggaaaatgagcctatttccaatgccatctctctctaataaagagaaacctcacttcactctaatgccacaaaaatgtgctcttggctttccttgagggagtctgttttggaaattccatggtcagaagaagcagggctgtggccggcaggctgtgtggtgcagcatgtccaggatccagtgtcctgtcttcttagtcagccaggctccctttaaagttagtggtttgctgggagacctcatgtgggttttcattttaaatggtgctcttgaatgtggctcctatttacatttttttttttttggaatatccattaccaagccttcatggtgaagcacctcccagtaaaggcagccaaattaaaggatgcgaaagccagctccctggtggactctggagatatgaaagagagcagtgtcttcactggaccagacccaagactctaaacccgtgggtgctggatccctgcagtcctctaggcttcactgggggtagaggaagccacagactcctgccaccaaatagtgcctactgtacacgcaacatgttctgctctatctttcacataaatgtagttgcttctgggatttagaaatattttttaaagcactgctaaataactagtcagcgttttaaatgaataggttaaaagcataactctaatgatgagggagtttacataatattttgatgtcgtaaatggactcttataccgtctgggccaagagccaacatacgaaggccctgggggttgtcctgaccatgtctgtgtgggcaaatatcggttgggtctctaaatcagaaggagtgcacttgcttgggctgattgaaatgacaagaacaaagtatagggataaccatccgtgatgcaaggccaattatataaccaatttcatcagagtgggttagaactcagcatcttgctaagccatttttcaggtttagcattggcctatagcatttttacttaaggaatctctgactccaaatacttgcagaaaagggacagtaagttctttcatgtaacagaggtaaatattaatccctgatttcttgcagtcacagcaacaaacattttagtaaatatggatacagtaaacaaatctgtatgagaaaccaggcctaacaacactgcatttttctgctaaagatcatattaacataggtccccactcccctgtttttcatggaataggggataaattacctggtctttttccccaccaagttttttaaagctaaaacttacctgagcattaaatgagtttggaagtgcctgctagctgaggggtaaagctgaaatttcagccgtttgtcactcactgcagagtttgcttgggtttgggggagagggatgagatgacattggataggcaaagcagtgacatcagtctcctggtgtttaaaaaaaaagtctctccagttccctctgtggtgagccaaattttcagtttcacagttaagtctaaacttaaagctttgttggctgaaataagaactttgcggagtgacatttctgttttcagggcttctgttgagaccatattgctggcgtaggaatttagcttcatgggacaggaaacagttataggctgtagtgagtaatgttcccctatttcagatggaaaaacattgaaaatcatgattttggccctcaaagaacagctattcgtggctgtcatggttaactctgtctctgactttgccttggcaacgaaggtcaatttaccacgataacaaggacgttgattttatggcacttgacatcttaaaaggtgctgaagtgcttcacaaactggtaagcagaccaaaccaaatgtgccttcttctgagcagtaatctcaagaaaaggtgaggatgtatatatccgcatgtgtgcacacgtgcgtgtgtgtgtgcatgtgtgtgtgtagaattttaaaaaaacaggctcaggaacttcctagctagacattttagggccctgtctgcaaaatgtggacttgggaataaccgcaggcactggaggcacctggtttacgaagagctgtatcattccagcctttttgttttcctcaagagaacctgacctagggccacaggagttactttgtcatttcccaccatattgtcctgctgagccaaagaatgttctttgtggaggtaaagaagctcccatatgatttttatgttccctgctgtcctcagaatcaaagttcaggtcctaagcctgggaatcagggcctccatctatgtcttggcccccacctactgttctggtcttacttcctgcatctctggaggcagttagtcctgagttcgaaacatctttacaaatcacttctcacttacttaaaagcaaatgcagcatttctgtactaactagaaagagcagaacacttaccttgtaaggttagattaaggtctgcatttaatgagccagaggcacaaaatcttacctattccagggggcaacccatagcaggagccagatgcagcacagcccagcagagctgtccccagggttgtgaagaaggtctgcagcaaggctgggctgtgctagacctggcaagccaatgctttctgtttacctgcccattcattctcgtccttgggctcacatcaccattccaaaagaacttgcaggacaatattatgcccaccacttaaagaggacattgacaagcctgactcaggcccagtaaggcaacatcctcgtctaggaggagacagacaatagagttggtgcccagctgtccctgaacggcatctgactcccgtctgcctgtgctcttgaagcccattgccccgaggggcactctcacctcctatttaatatccttcgtctgtctgggaacgattttcacaaatcagtgtccctgcaggtagttggaaggaacaaatgagataattcccaccatgttcttagcacagagcctggcttgcggtaagtgttcaataaatgttagctgctattattatcgttattactcacctgctctgtgcttcacagagcgttaaatacgcgtggcaccctgcataaaccctttacttcctggcctcaacctttctctttgcctcaaaacgtcctttctcctgtctttgcctccaaaccgtccccatcctgttaggctttgctcaaatgccactccccctgggggaggcttttcagattgctttccgcttccctttcccaggctggaaacgcgcacactctcctactctccctctttcctggcactgtgctactttcctttcctggagcaaggcttctcagactttctgtggtcaagaactggccccatgccccccagtccatgacggatcaatacttgtataaagtacaatgtaaaagaaaaaggcagttaaaaatgcaagctccattttttattattagagttaacagacacaaaattacacaatcacatatatgggcaaggtttaaaaggcttactctcagtttctgtacttctcttgccccagaccaacaatgaccaatttgaggaccggcagcagttcgtggagcacactttgaatagtgtggagtttacgttattcccatctgcactggcacagttactcaggtactgtctaattcagtgaacccaacctcccacacctggcaggaggcttatacacagggttgctcgataaattagttgaattgaatgaatgagtgaataaatgaaagcacaataaatattgaatgaatgaatagatgattgacttgctgagcatatttaaaactcatagtccttaggaagaattttcttaatgaatagcatgccaaagggattataatttttttatctttgccttttataaaattcactcatttgcattgcatattaagaccaattctttttccttagtttttaaaacatttttattttccgtctgtgatagctaaatggagataaggtttatactttcacaaaaataagggcatacttggtaatatcttcagaaataagataggtgagaatcttaagagaacccataccttatgctttagtaagaatcaggatttctgaattgaataattgcaaattagagagcagaagaaagatattatatacttatatgtatataaacttgaacagttaccactcaagagccgtattgaattaacaaaagtaaaagtttattttgtagtgttgccatcagtcaccaaatcaatgttatttgaaaagaaaatctccctacccaggttttcttcctccttggggaatacagtggtaattcccagacttgtggtaaaggaaccagtgcaccagtaagcatgccttccaataatcactgcatctgtctcaacagaagacaaaacccagccctacctcctctagaactacttaacggaggttttgagatttgagggtaagctatacacattcttctctggaaatcacatactgctattgttccttcaccttaaaaagagaaaataaaatcaaatcgagacctgcaaaccattcagcctccttcattttattgtctcactatctctggtctcacttttctgcagactttcaaactcacaacaatctctccttttttgggggaggtctacactgcacagtcattcaggccaggaacatttgtggaagtctcctatgtgtggagcaggaatacagaaggaaacaagacacaaggaaacaaacaactccacacatgtagctgacagttattgcacaagtccaggagcgccatatccatggggagagaagtgcagggcgtgcggtgtatgaggattgcgttgtgaatactgatccagttggacgacaaggagctcagggaaggttagtgcagggaagtgacatttaaggtccaacaagaaggatgagtagaaatttaccagaggaagtagtggaagagagttctagggcttatggatgactctatgaccatcaggatcatcagtatcactctcttccacacccacatcttgtccccctggcaggtcttcaagggcaataacaggcattgagctgtcctcgcctataacagcaatgcctccttctggaatatctctggaaggacctgcctgaggctgttttatagttatcatttaaaaaaaataagagtacactctaaaatgacaatatgaagcatattataataaatacacaaaccagtaacatggtcatttattatcattaccatgtattatatgctgtacataattctgtgtgtacttttttttttttttgagactgagtctcgctctgttgccaggctggagtatagaggtgtgatctcagctcactgcaacctctgtctcctgggttcaagtgattctccacctcagcctccctagtatctgggactacaggtgtgcaccaccatgccccgctaatttttgtatttttagtagaggtgggtttcaccatgttggccaggatggtcatgatctcttgacctcgtgatccgcccaccttggcctcccaaagtggtgggattacaggcgtgagccaccatgcctggccagtctgtgtgtactcttatacaactggcagtgcagtaggtttgtttacaccagcatcaccacaaatgtgtgattaactcattgccataagacattttgatggctacatcactaggcaataggaatttgttagtttcattataatcctgtgggaccgctgtcatatttggtcccttattgaccaaaatgtctttatgggacacatgactgtaataacaaatcactcacaggtacatattagtacttagaatgccataggcactgttattgtggatcaagctctcagatactataatcacacccatttacagatggggaaactgaggcactgggaaggtaaataacttgccaaggtaacatagcaaggaaataatggagttaggatgtgaacattaggcagtgtttcagagcgcatgcttttaacaagcgtactattctgcatgtgccacaggcaaaagcatcttagatttctttttaggtttgtagtttctaatacagtgctaagtaaatcaactcccaataaatgcttactatttaatcaggttagatttagttattccattgccaaagggtgtttatttaattgaaaacaagatgggctggatgagggtgtgctggctgaaccatgtgataacagaggcagtgaggtgttgactgaaaccacctggtttcaaatctctgcgtgtcactttgccagtaccaggataaatcccgtggcctttatgggagaactttcattcatttatcaaatttttgttgagtggctacaatgtgctagccactgttctaagttccaaggactcaatagtaaaccaaacagacaaaaccctacccttgtgtatcttacatcttgctcacatgacaatacacgtaacatgcttagcacagtgcttatggtactggttaatattatttatttttttgagaggaagtcttgctctgtcaccaggctggagtgtagtggcgcgatctaggctcactgcaacctctgcctcctgggttcaagctattctcgtgcctcagcctcccaagtagatgggattacaggcgtgcaccaccacacccagttaatttttgcacttttagtagagacagagttttaccatgttggccaggaagtctcagtctcctgacctcatgatctgcctgccttggcctcccaaagcgctgggattacaggtgtgagccacggtgcctgacctgttatcatcatatggtgctgctggttagtgctttttacagacagtattggcacattcctaattttttggtagggtgtgtcaaatgagatagcaaaacagggtttgtagatggtgatggcaaattagatcataaaaggtgattatcgttctttgaaggtctccagaatgaccactgttgaattaatcatacaataaaaattggctttaggttttaagatagccagcatgttttcctcaaaccttagagtagtaattttgatactgtgcattttagtggtaatggtttagtagtagcaaaggtctacagacgtttccgtaaatggccatacagtaaatgttttaggatttgcaggcaatgtggtctttcttacaactactcaactctgcctgctgctgtaagaagaaagcagccatagataatatgtcaacaaatcggtatagctgtgtttccaataaagttttatttatataaacaggcattcagcccacaggtcagtttgccaacctctgttccggaagaaagtaaaaattctgttagcagtaacattgtgcaggggatcagctttttaaaagaaaacatgaactaatattaaaaaaaatcattggctcactgcaaagtcacaagactccttagacacttaagaatctgaatttgacttctgatggtttaagtttactattttgcatgaccttattttctgactggttcaagatcaggatcggtactagggatcacttaaggaagaaatttcaagaacctggaagggacatcttctctggaatagaaccagaggagataaactatcccatggacatttgtattgggccctgaaggaattttcagcagtgagggctttgcagaattgaaatagaagggttatcgctgaacaggattttctttctctagacattttaaaatccggagaagtcctactctggcaactggtcaatacagagttattaattactcactgattaaaattttctactttttctgtatcttgtccaatatggcttgtttttgatctggtcagaaggttactggtggatggagtgaatggatagtgtattctctctgggattcggtgtccaggtttaagccagagtgaagtcttgttaaattgcaataagggagaggaaaccatctgaaagagagaaaaagaagcattttctaatgtctttcaagaaatgaaattttattcaagggccaaaagagccacagggtaatgagaccatgaccagcaaacacctatactagataaaagtaaattttaattaacatatcaatagtttgtagatcttaggtgcttccagagtgcttgaggttgtttgacaactttttcttcccttaagctcttttgctttctctttgaagatctattttaaacaaagagaacccctgttccaatctattttgatctcaaggatgtctgatttaatgtaattttctcacgttcctaccaacttgcccaaggtgaggaataatttactttgttagagcaaaagaacaaagaactttttgggaaatggagaatagtggacttcctttaaaaataaaaaaagtactgcagtttcgtacatcctggcaaaactgccacctatcatttttaaacttttgcattcttagatggtcttacttggatttaagacctttgtgagtttgttcaaataggcagtcatgcaaaaagagcctgcgttttctaatggtggtctcctgtgtgtttagctttggttgatgggcgtattagaaacaagcagagcacgggtgattccagctcattggatacagcaagtaattacctccctgcttttggaaacagttaaatatactcccactccagcaatgaatgtagccagggccaaggtgggcagatgctggctgctcagtgaccatgttcaggatgatgtgtgtaggaggagaggaaggattccaagaagactcagtaccttcttctaggattataaggatttaaataggcctgagggaaggacccagcacatagcacgtgttccataaagggcactttccatccttatcccctctttctactttgaactgctcgtaggaagacctactttaattcaaataaaaatgcatttgtgttaaacctgcggcagaagattcaagggcccttggcctcccagggtttataaatagatggaaagatgtatatactgagaaaaaaagtgaaatgagagttatgcaagtagagatgactgtatttgacagcacaggccatgcaaatgtgaggtgagtggtaaaatcagtgtgaaaaatagacaatgtttgagaagtatagatgggaggagggggagctggtccagaatggttaaggaaggcttcatgggggttgtgtgatttgaccaaggccttcatgggtgagtaggatttggatggatggaacaaaggggatcacaggtggagagagttacaagctcctaaaaagctggttgtgttttagttttttagttcattgtcctgtgtttggtaaatacttaacggatggttattaaatgaatgagtaattattttgattgctttttctcctctgaacttagtctatagcacacaattaaaactcaattctgtatggtctcacctcatcaaggcaattctttcctgtctggctatactattaataccttgtgggaaaggcccatgtgtaatatttttcatcctctctagtaataactagaatgttgaacatgtagcagatgctgcctaaactctttctcattgaacaagatggtcaaagacacaggatgctaaactttgatgagaactagtgtttctttagggccctttaagaaacaaatcattgtgaccatagattgctttgctaccaggaagagcagacctacctccagggtctgcctgacaccagtgggaatgaacccatataccacttttgagaatctccttgccagcttatgaagataaacctgtgttttcctggcaactaattttgtagatgaacttggtccatgctgcttctccattatgtcaacttttcaccatataggtttttgatggtctcacctgaagaatggaagtggagctaataattacctagtatctaccatgtgctttaacttccgcagtagccttgtagatatcacttttgttcttttaaaagagagaagctcagagcatgtaagtggcttggtcaaggtcacataatatgtcatgatagatgaatttgaacctaggactctgagctagagctgcattccttacattgtgttatggtgtccacatgcccctgcattttcatgcattactagatttgaataatcagaggggagataaaagaagctattttagatgaggggcaatcgttgaggcacagtcaaccaatgaccttggcagaagaggagagtacctttgaggggattaataataaataatcttgaattcctatgattgggtgagattccattacagatggttttggaagacttcagactttatgaaatatcatgggaaccactggaaaatgtttaactagaggtatgacatgataaaattattaattaatctaataattaaacacacttagtgagtatatatcatgttccgtgttggaacaaatcacacattcttcctgctctcatgaaacttttattctagtgggcaaacagaccttagataaataatttcataaatactatatataatacccaagtatggaacatgcttcattataaatgtaaaaggtctgtgagagtataaattttagaccatccctctcctgagaaagttacttttgagttgagatcccaagagatgagtaagggttaactagctgtattagtccactttcatgctgctgacaaagacatacccaagactgggtaatttataaagaaaaagaggtttaatggactcagagttccacgtggctgggcggtggggggggcgcctcatgatcatggcagaaaacgaaaggcacatcttacatggcagcagacaagagagagtgaggaccaagtgaaagggatttccccttataaaaccatcagatggttcagtatgggggaaactgcctccatgattcaattacctcccaatgggtccctcccacagtatgtgggaattatgggagctataattcaagatgagatttgggtgggacacagccaaaccatatcactaggtaagaagagggctccatgctaaggaacaggatatgcaaagaccctgtggcaggaggaactctacctgcttttttgaagaattccataaggtagccttcagtggagctgagtagagagtgggggagagtgggctaaaacatgaggggagaagtaggcaaaagctaaatctcatcaggaccttatagacaattgacagatgtttgtctttatccagtaaggtgtttgtatgctccttaagtggcagcggggagtgagcagagcagtgaagataaacatgaaagctggtggtaacaaattctgatacctcctctattccaaaaggaaaggcagaactcagaggcaccatcctcctgttgtgtttgcaagctgttgacacaacctggaaaggttaaaagttttcaacagacttgtcagagtttgtgttcaatggaaactgacagagcctaccggctgaggggctaattttaatagaaataacctaggtgcgtttgttaattttctccgttccctcaatgacctgtctgcatagcgtgaaggtgctttgatgtgaccaggagaacagaaggatattttgtgcatagctgaccgtgagaggaatgctggttttgcaatgaggaagcacaggaagatgacaggtgagttgggtggaaggggagatgagaacatgcatcatgtggcttttcccacctccccaaatgcagccttgtttatctaagattcatctttcttctctcagagaattaacttttgtgagtttagcgtgtccatagttgccaaggaaattaaacaaattggccaagtgtgaacatcaggggaggggaagaagcccctgctacttccctctgattcagtgagtttgttgctggttctctttggtttcataaaccttgtggtgcttgccgaggtctttttaggtccaagtggcagggcacattctgcctgtgtaaatggacggggtgggggatggcctctttcctacatgcaaatgatcctggtgttgcccacacataaaggtctttatctgctggctgccatatctggatctgttctgggggtgagttgccaggacagtgtgaatgccctgagaattagaatggagccccaaacgtgtgcacactctgactttgagtcgttgaggtctcctagcagtggcaggcagagcctccttagtggtaatggagccagacactctgtgggcaccagggacaaggtcatggtgtgtgtgttggtggtgggctgcaaagtcagctccatgtggggagggttctgctgcagggggcaccccaccctccctgtgagttcttggagaaagttcttaaccccatggattatttctggaaagtggaagtcattacactgagtttaccggaatcaaaggagtagtaggagcaatgaggtcctggataaccctaaatttatccagttaactcttaattgtctggggactggttacccatgcagtcatggtgaaggctccctcctgcctgccccaaagcagcctgctgatgctcacagcccatcctccactgccaagttcctcagccccgcccaggagaggagggcagcccacatctcaccatgccttctccatggttgcttacaacattgctttctctcatactccagagcacactgcgcttgagttacccacctaaaataagtgaaaggagttagggaatacgggagataggaacgtgtctgaataaagacatttattaaacagatatctccctgccaagcatatagtaggcactcaataatttttgtctatctttaacctcactgggcattcaaaattaagagacattcatattcaaaatacagaatgattcttaaacaaagtactggagtttcttgctggggcttggaaaagcctctgttggtcctctttaaaaaagcatccagtctattaactgggaggaatctgaatgtgtaacacgctgtcatgtagggaaaagaagggtcaagcaagaaaagctagattagaatgttgtatgttaaagaaagaaaaactaggtgcatgcttcagtgtaggaggcatccctggaaaagagcaggttgagtgattgtgaggattaagcgcaccagcccggggatccatgagcagaaccaggaagttgtgggtacacagaagaggaatttggatcagttctccagcaagaaaacaaaaatgtgcttttgacagtaggggccatatcaaaaggaaattggatatcaaaggatgttttaagaagagctttggatgtcaggggcctggagcagagggaatacagagcaaaaacgaaaggcttgggaggccagaggtcctcagctgtggctctgacagttggggcagccaaggccagaactcacaatgggaagcagggcttttcttttgttcttttaagggagggatgtttataggccactcaaggaagagacagagacattagatttcactgcctgtgtgacgttttgtagtccactcattggcacccctgagcttgtcaagtcagtcgggttgagggggggcttctcatatggagaccccaagagtgggtgtctgcaccctgctgacaactgctgacaaggaggaaagcacagattctctcaagcatccactttcctcagtggggcaatgacacgggccggggtgcagaaccttgtgctgagggctgggagaaatgtatgtgtagcttgtgccagaactaggatccgggggatgacctggggtttgttagggtgtgttcttaaccaaagccccgccttccctgtgtgccttgggagatggtttgggagctgggcaggctaggtattccaggttagctccgagcacacacaaacccaggcacacattgcacctctgtctcatatggattctatcaccaagaccctgagaattacttccagcattcatagcaaacctgtctgctgtccccacccggtccaggtcctgaccctgactcccagtggccctctgtaccatctcccacttttgccctctgctgtccacctccttttcctccaccacacacagcagggagaatgtcctttcggaaatgcacatctggttctgtcactctcctgcttgaaaggctttcttttcccctgaggacaaaattaaaagccctttaccaggtttacaaggccttgtgtgacgttattttcttattttaaaggaaggatactcagagaaaagaaggggagattcgattttagagagattcaatttctaggatcattccagtttacccttcctgctgctgaattctagccatactgatctatcagtttcgtgaatgtatcatgctcttccctacctcggggcccttgcacatcttgttcccagtgcctcgaaatttttatcttattctctccacagctgacccctactgatccttccagtctcaaaataaacaagcctttttttcagtctctcatgaccctactttgcttccatttactttgttacaatttccaactggatattcatttatgtgattacttgttcattgtctgtcttctctattaaccgtccctaccctaagaggaggggccatgtctgttttgttcatctggatgtcttccgtatattttaaatgttggttgactagaacagtgaatgaatgagtgatttgtaacaggttgctgtgactctgtactttcatggagaagaatttcagcagctagtcactgttaacttaatttgttctctctacaagcatctgatgagcagttaatatgtgcaagctaaggcacattatctatcttcaaggagattctggtgaaagagacagtcataaactatcaatccacacagtagaataagtgttacaacagagttatatacagggtggtctgagtacatagtttctcatgctggtgttccaggtagtataattttctgaaattaaagctggtaagaatcaacataccggggatgtgattaaccattcccaaatctcagaaagacattagcctaaactgtaaggagtgtaagataagccgtgctctagttaattgtaactgagggcatgtgctggtgatagataatgtgatggctgataaagaatactgaaaaccagagccacgggaatgtgtcatggcccctttccattagggggagtgcagccccatgccaaatgaatggtcccagctctctagccacaggtggctctgaagatttctagccacagacacccctggacaacacagtgagacctctctagccacagatagccctggagccctgaagtggagaagggcacactgttctgcttcttccatgtacagcctgttcttccagctttgcaaaatgctctgataaattaggagaacactttaaaaattgaccgctcaggccgggcaccgctggtcatgcctgtaatcctcgtactttgggaggccaaagagggtagatcatctgaggtcaggagttcaagaccagcctggccaacatggcaaaaccccatctctactaaaaatacaaaaaattagctggacctggtgacacgtgcctgtaatcccagctacccaggaggctgaggcaggagaatcgctggaacccggaggcggaggctgcagtgagccgagatcgtgtcactgcactccagcctgggtgacagagtgagactccatctcaaaagaaaaaaaaaaaaaaaaaaaagaaaattgaccattcattcccagatgttggtggggagaggaaaggagacaatttctggctcttttgaattctattcctataatttaagatgattgactactttattagatttagtatcagacttgtttccttctttttaaattaagtttgacaaaaggtaatagcagtgaacccaagtttactattttagaactgtcttcactaactagaaagatgacctttagatagttactccaggagtgtcctacaaacgaatttcattcacctaagggtagaaggatttgaactttgtttcctgacttgatgagtatttcatgataaaccagttctggcccattaacttcatttctcaaaacacaggtttaaaaagagcgtttcctcaaggagttgccattaaaaatggaatgaatccaacttgctggaaataaaaatggccagagctgaacatggtacacaattgtgatgaaaagagcttgttttttcggtaggaggtatgcgttgcgtgtgttggttttgaagtaataagtaacgttttatagataaccaccaacctgtgtctggtcagcagtctaatgtcccactactgtcaaggatgcctgtgatgtgtgagcttacctttccattctccttgtatctttcctgatttatctagaaaattaaataaatagggaggtaatgttccaaggaaaggtttcccttccctcactggggatttagtgggggacagtatagactgtcctttaggagataattagaactgacatctacagaaccatctaaaccttgcccaaactttgcactgggaggttgtgaaccggaacctcattactgaattccatattgtggagtgtggtctcatccaaggaatgtctgcaattcccattccaatctgagtaaacagtcagttatgaacagtcactggggtaaaccgtaattagatatgttcttgaggtttttagagtgattctttcatacctttgtaaaattgacaatacgtgaaagataaaaatttccccacagatatttcagctaattactccttctaggtaaagattggccccatttcttggtctgtctgatgatgacttttcattttctgccgtaaacgaacctaatttgcaaatgaaaaatttcactgaagcgtacgttgcctgcaagggaattacagcccggaacctttggaagtattcagtagaacacgcaagagaattttaaacaaaagacttatgctcttaattcacacagttaaaataacgattgctcctaagcagtacttattatttttaagtttagacattccaataacagtaatcaagaggagttaagttcactttaaagcaaagcaaaggaggagtaactgtcaaaacttgcttaatatttcctgtttgtagggtgagattttcctcagatcacaccacattcccttgtcgatacatggaagccctttacagcttgatgttaagaataggagtagcaggctgggtgtgcacacctttaaccctagcatttgaggaggccaagtcggaaggactgcttgaacccaggagctcgagactagcctgggcaacatagtgagactcctgtctctacaaaaaatacaaaatattagctgggcatgatggcatgtgcctgtaggcttagttactcaggaggcaggagtgggaggtcacttgagctcaggattttgaggctgtagtgagctgtgatcacgccactgcactccagcctgggtgacaaagccagaccttgtttcttaaaaaagtagaaaagaaggaatgaagaaaggaaggagggagacagagagggagggagacagtgagggaggcagggaaggagggaagaagggagggagaaaaaaaggggggagggagaaaagggagagagggaaggaaggagggagggaagaaggaaggaaggagacagggagggaggcagggaagggggaaaggaaggaagggagggagggaaagaaggagggagggagggagagaaggaaggagggagggagggaaggaggaaggagggggagaaggagggaaggaaggaaggattaaggaaggaaggaaggaaggaaagatggaaggaaagatggagagataggaatagcagttcccttctaggcccaacataccaggcagaaaacttgggttccagtcttagttcctgcagttattgactctgactactgagaagattctttgccttgagtatcagttttctcaactgtgaagttggaattaaaaggccaagcattcttgtgcagactgaaatgatcctgtattcaaaagctgcaatggtacattgggaatgaagagtaatggtgtatcagacttaattaacactagttagtccttgtggtttagggcaggtgaagtcacgatttacagcccagatagatgtattttaaaaattaaaaacagccagagaaattatccaagaagaaattctacatttgtcacctcctttgtactgtacttgagaactttattttatccacttatttattccaaagatactaattgaactcctactctgtgccaggtactgaggataaaattgtaagtaacacaaaagtccctgctctgatggagtttaccttccaggcagagggaagatgacaagcagaaagtcctggagcccccttggagaacagggtggctactgtgaagggagggaggagagggatgacagaactgaggtcagagaaagaggcaaggccagaaaatgtgggaccttggtaaatcctggggaaagtttgcagcaaattccaggtatgtagcaattccttttatttattttgcatgcagaaagcctattacaatttagatatttaaccagcccaatgtgctggaaagcagaccagtcaagacaggctcctccctcctttcactcctgtttatttgcgagtcagtctttcccgactttctggaccctgctcaaatcctgcttcctccacaagctcttccacagtctgccccatcggaaacactccccctcttgtttgctttttcctctttgtagtacttctcacattctgccttgttttaaaattcttcatgttgttcacccttagtagagtaagagcctctggatgccaagaccttgtgttactcactattttttattttttgtatccattgccatgcacatgtgccttctacatgggcgatgcccagtaaatatttatcgatttgaaataactcaaatctgtatatcaggctagcagagaagtgtttcccaaagcgctgcaccagagagaagctgatctgagggcacgatgggaaatgtatcacgaacactcacaaaatggctccccagtgtgtatttatccagatgtccttttgggatgggacaggaccggtttttaatgactctgagctgccttccctaggcactaggagcctacattttgctgactgtggaagctctttgtgtgagctccacgggcagctgtgtgcaaggaagatccagctcttgtctcatccctggaagcttggacaagtcagtttccccatctctgaaatggggattataacctctctcatggggacttggttgtaacagataatcttgtggactattttgttaagaaaaataaagatttatggtattaaaatatgtatgcatgtctaaaatagcttccagtgctatctggctgtctttgcctgaattttactatgtctgtaagtgagattcagcattttcttttggactgtgaattgtcgctactaaatgagcttatcagtctctgggaaggaacaaaatgtcattggatttgccccatgctgcactgcttgtgaacttataccagagcacactggataaagcatgtacccgattccgagaaggctgcagctctataagggacagtagtgtacacagccattccccaaagccacctagaagaaacttcaggagccttcacacctggctctgcctcacactcccccaatgtgggtgtgggcctggtaaggtgctgtccgcatggggtcttgccttcctcatctgcaaagcctcagctctgggattcaccaagaagagccaatctcctgctcctctcacttcttccacttgcagacaagcttttggactctgccctttggcttgtgattcataattccaaaccccctatcaatgatcaaataagcagcaggaagtagcagtccagatccttcaggggccatctcatcattctgaggaccaggcctttagtagaaaagatgggccagtttggaagttgtcctgacttttagaaagtagtttgtgtcccaaggggcccctgggtgtttgttcagggcctgtatgggctgcctcaaaaggccaggaggtgatggaaaatcatggaccttggggtcctccagtccccagcactccacctcgaacaagcatccttatttgtaatctgatttgcctataggattctgcataagattttgcttaagcaaagggttctgctgctttttaaaaagtgctcaaaacctctagtttatatacttttagattttgtgtccttgcacaacctcattctccataagattggagaaagcatttgtcaccagggcccagcccgcagactgagttgatatttacaaagtagccaagattcctcagatgggtaggcattaaccttgtttagttgaatgcagtcttttctttattggttttgtatgtaacttcctttacaattattagtacatattattaaaagctctttctttccaggaaataagccttttaaaaggcattgtcttttttaaaagataggtattttaaaaaatatatttttggtaaataaattcctactgtaagtatctaaaatacttctaaaaactaccccctatgatcatctcggcatatacccttcagagcattgcagcagccgcccacctgagcattctagcttatccctgggcaagccagctcagcctccagaacaccaaaaaaatctttcaaaaccaaggactgaccagggccttccctgattacagctttacacctttacacccaaaggacattctgttcatccatgccctgaattctctgattcatccagtaacctttattgagtccccatgatattccaggcactgtcctgaacactgaagaaaccaggttgatgcagaaagactatgggctctcaagaagatgcagtgcttttttcctggaatcctcttccccttttctctgcctggtgaaacccgctccagtagcatcttttctgaattcttcctcaggcagaggaacgcctctttctcattgctgaggcatatgcccatgtatctgttgttcttctacctaaggtttgctgcaagtagttgtctgctgggtgcaccaagcccctgaagggcagtaactgggtcttctttgtgattgtatctccagcatctggctcagccctggatacccagtagtggctcaaataatgttttctatttccttcctgatctttcctatctgtgctggaaataactaattccttctcaattttgtcttccccacagaacaatgagcataagacatgctgggtgcattttttggaccttaccacatcttgtttgagagaagtgggaccaatgctgatgaaactctttcccatggtgtgttctatattcattggatgggcatcgcctacggctggagcagggctgagctctgtactggtgtctcttaaaacacaccagacagcaacagctgagatacctactacctggatctgcttgattagatcatacggtcatatttgattacttagaatgggtaaggaaaaataccattccaaggtcaatttaatggcctagatcttccttcctaaaactggaaggtgaatctctgcctcttaaatctataggtctttctgggggcaagacttctgactattctgatatctccttggaatctatggaaatctcattatttttgttcactcacataaaggagtagttaccccaggaatggatacctcctgatgctctatgcttaggagaaaaggctaagtctttctaatgaatatcaacatcttgacctgccaggttcaccagcatgaggctctctcctgtgcctaagtcctacaactgagacaaagccctaggccatgttgaaccttggaaaatatctctggccatcacgtgccttgaaggacttggcgacggaagcagagaagtttgtaatcctcacctgaggtcatctctgtcttctttaggtcattgacatggcagacattgtttccttttcgttcagtatgtgcctgcccaaaccccgtttcatggagttctggaaactctgtcagtgggtaacaactacttgtagaccttgtggaacaagagaaaatgtgcctgctcctttttcaccttctcagttgattagcttcagaggtggccatcgagttatgggtcatgagaacagctttgccacaccaccacttccaaagggttgatgtgaaaggtgctttcctcaagcaaagagcaattctatagaagtccagatgagcatgcttacttattgttgacccatcatctttagttactaccatatcggggtatagattactctcctgcatggttttctgcatgtcccctgtgaccgaagtaacttctgagtacagggatgagaaagtcaccagctctgtagccgcagcattgttggtctgtatctccaggcataggatctgggataatgcccagatagtccaccatgtggcctcatgcctatatcatttgtttggctggtgcccttggcagacccacacctgacacctgcttagtgcaagcccttgagctctgtcttagggaaactttgggtctagcatggtctcttgtggcacctaatgcgttcatattggtaggaacacagtaataggaaaggaagtttatctttctagttgggatttaagaaaactcttaaagatggaagaatattacctttttttgtttccttatctctttgtggaataaatgagtaaatactgtgactgcagtcacatgagataggtattagccatcagtctaactagaggatctaaggaaacacttcagaagtccaggagaacgaggcagcagtattgacagcagatagaggaagaagcagcagagtagatctggaagtggggagtgtttaaacaagagggctgggaggtgcaatgtcatactttatttatacctacttcagcattcacctactctgtcaccctggaatcccctggagtttatctggagagaggcactgtggagagcccctaaatctccagcttgaattcccttagcacttgcttcaaagcctcagatgatatctgttgactggaggggaacaaggttttgactgtggttaggactcaccattctgtgtataatgccaacaccacccagggcagttcataacattttaatttcctcataaaatgtgcttttatttcattttgcaatatgtaagcccatcagattgtagagatgtaagtaaatggggaatgttgtttaaatggaatctcatggaaggcacacccagcaatcattttcattcatatttttacatttcttttggcagcaagaatgcagtgtttctccttttcattttcatgtagtgttatggggcatattctttgtgggtttagattccagagtagcatatctgatttatacttgataaagtggtgtttgccaagtaattttgctgaaaagcagccacttaggcagaaagggaagaacctactataaaaagaacagagcagattatggagctgcaatgtcgttcattgggaccaagaaatgttggttaccgagagacctaaaaactagaagtttccttgattagacttagtttcagttttatttcacatttttttgaacatactgccagcctttaagtgagtttcatatttgcttatcaccagcacccttcgttatttcttccctgtaagaatggttataaaactaaacaatataggtgactatacattttattgtaaccatggaaactattgttgatgatttattaagcatcctttctcctgatcccaaacaatacattgtgttggcccaagttccctagaggactggcttttccattattgcatagaccaactttagctttatttatatcttggtttgttcaattgtttgactacggtgttggcttctggaaacataaaagctagtcttgggggccaccatcaagtgtttcaaagtgtttaaagaccatttttaacatatgccattgtagaaacaagtttaaaagaccactttaacatatacccttgtaggaacaaatcaggaaaaaatgaaccttactttatcttttcccttgcctatgaatacacacaagcagtacttacatttctaataatggatgggtataaaatacttagcagcccaacgcactactaggcactcagcaaaggtatgtcgagtctacctttcctgaattaattcttgttatgtgaagttgcttgtggataaataaagagcatcatgcgaatgcttcctgtagtcaatctattaaggctggctgactgaggaagtcgggtggaataatttatctagtcccaggaccttcatcccagaggtttcatggcatcttctgccggagccccacagctgaggattgcccctgggaagtgggagtgtgtgtgccaagccctggggtgcactgggcttccttcgttacacaagtgcttccatcaggcccaggcagtggcggagggagtacagcagcgcttacggacgcccattttgatggcaatttggcagggagtcaaactttggccctaaagcagaggtggtgcaattagacagctgagatgcattctctaaacacacacttttaattgatttcagcttgttcagttcacaaagatagagctctgacacatagcagccttcttagaggggcttatttttacttttcctttattcagcagcgtaattcaacggcaacagaagcaacaataatgcagagctctaaagagtgcgtatttggcatggctcggatacaaaaagtattattaagaactaatgagtgagatagttagatgttaaccggaaaagcattaatgagcagaagagaattctggcataaacatctgtttccgaagcagatgttaccttgtaaatctgctgaagaaaagcctgtgtaaatggaacagtggactgttttaggtattagcagggacagagtgagatcatgaggttttcagacactgttttcagctcttctgagactcataaatgactgcgtgtgtcgaggtggtgaattttggggggcgttttgggggtgacaaaagctatcaggcaggggtgaataacagtggcagatcacaatgagtgtggctgtgtgacatggtagctggagaccactgattcctgtttcaccgggagagatttgggattctcattaactaaacagcttgtctcttgtctcatcttgtctagagctccataatcatttcagtatagatggattttggctgctgtcatctccctgggctagagatttaagacctgttctgcctcaacaaaaattacataacctttggctgactttattgtatagctttctttacatgggtgactaaatggccgataatgagttaatgggcaagcattcccaaattacacaatgagtacattttagcagccttaatgcttgatccaagaatcactaggtggcaagattctcagggatctccaatagaggctggggtatttctttttttagagcccccaaatgacagtgtgttggcaactgcctcattcatattcacagaggggcaccttgatttgggttattttcacttagaatcataaaactgagaactggaaggtagctttgggatcatctagttgattcagatctcttagtaaacagaataaaaaatacaaggtcttgaaagtgattcatgcagcctgacccaggaattggtgaaatggttgatcctcagaacccagaccagggttcctagacaggcactatcctcactttaccccactctagagaaaaactcttgcatccttctctgcttactgaatattacgaatggagaaatgtctctgaaggaaaagtcttctgggcaaaaaccctgggcttgccccatttggtgctttgaaagttgaagtgggggctagagatagagtgaattccagcccccaggtcttatagttaaaggttgcccttggatgattcatttgcttagttttatctaccctcagaatggtcattggcctggtaattgggaatgttctaccctccatctttggaaagctgtatttgccaacagcttgatgaggtcagggcatccttggagcctgctgcttgtcactgctcggtgggctacagaggaactcaggaaaccaatcccaggacttcagagcctacggtgatggtttttgctgcagctggataggtctgttctccaccacgcacacaaaaatgtggctctgaaacctttaaaggagaatttcttgatcaaggtgatctttttcatttggggctacaccaggactgcctttctgggttcaggatcttctgtctagagaccttttagaagtgatctccaaggatggcctgtgtattcaagcaagtgaaaggcatccttttcaccttgcaccaagttcctgaaagatgcaggtctcagccatgcaggtctcagccattttctgtgtatatatatgcatgtttgtgtgcatgtatgtgcacatgtgtatatgtgtattgttcatgcaagaaaaagcaatgaacaaagctacatctgtgagaaacaggatgttttcccaagttagcaaggtctctgttcttctgtggaattccctctcacataaaactaaggcaggctttgaggaagggtggccacttatcttggacttttttctacagtagggggatttactcatattcactgggagctttttattatctctaagagaaactggaaaagcccagttaacagaaaattcattccttttgttatgcttgaggtgctgattcatttatcttgaaagaaactttgcatgtgttgtatggctcctggtatgtcagaagtgggttttgtgttacttcagggggtctgttttacactcccaatggttctgggggcacatgtagcaaacagagctggtgttgggtgtagacactggggcagatgtttaggaggctaccgttttgaacagtgtcaatcgtatttgtgattcacagtctccctagcagtgtttctcacctgcatggtgatgacatgggtgattgggagattttagaggtttggctgtgcttttcagttcctcttttaaatggcttcttccatcattattcagtgatgatggaggagactttagatagaattttttaaagaaaatggaagaccttttcttgctgtacagaatgagtgtttttcttccctggtggcttcgttgttagtttactagtttactagcccattttgctctcagacccagccatgcctcccttcaccttcgtattaatcctctgaggttctgtttactgatgaggacatgaggtttatgggatttggcaagttacttgaggttacactacctgtaggtgatagagccagaatttgaatcaagatctgcctacctctctgctaagcccacagtctttccagtctctacagctgtatgtctcctgtcgccccatcccccaccgctttttgcttctttagtaccaaactacatgtgcattctggaacaaatcatcccgtttcttgcagctgtggctttgtgcagtttttcttgcatgaacaacacatgcacacacacttagaggcaaacacaaacacagagacacacacatgcacacacttttctttgcttacatatcttgcactggcccttcaagactttgtacaggcatatggcctctcctgcgagcagacttccacaggttgtcatttcgccctctctgatgggtctgttctcgagctctgttttgacactaaccatgtcatatttcatagatgacctgtcactctggccaacatgtgagtgccttgaggtcaagggccttgtctcagagcctagcccagcacctggcacattcaggccttgataaccctctgtagatccgaattgaaccaagtcaagagtggggtttcaaactgtgtagcattgataacacagatgactggaactttaggagctggcgtaggccgtatccctgagcacatcgagaaatgacttgctaacagaagacatctgtgtctctctacttttcaagcactgtgacaatctccaaaagcaaaaggtttaaagaactataacatttatggctccctggccataaattcactgcagaacacataaaaaatgccattcccacagggttatggcagagattcagtattgcaaacatctgcacatgggcagtaaagctaacctctggtgtgcaagctcgactgttagcaacatatattaacattagtgacaattgaatgtgattatctgagatggcattttatctgccaactgcagacttatggcttctcaagacctcatttgtccccttcctcatatgttgtttttatatgactgaaatcacatgcagaaattcgtgattagtatggctctgcttttagtttttggtggatatgggtatgtataaattttcagtacttaaattgattttagcactttgaatagaataggctctcaaaagtttgttaaaacagctgagtgaatttcaaagcattatgactttgcatttgaagacactgctgagagccaggaaaaaggagtgggttctgacattggcttgacaggattgatccaacaggtttgtaattaatttatctggtaattggttggagtatacatgttatacatcacatctttaagtgtaagtgttgtcattatttcctttctgttatttaaaccagtattttttctgtgtagggctagatagtaaatattttaagcaagtcatatgctcactttttgttttgttttgtttttgttttggagacagggtcttattctgtcacccaggtgcaatcatagctcactgtgacctcaaaatcctgggctcaagcaagcctcccacctcagcctcttgagtagctaggactacaggccacactgccatggctggccaatttttaaattttttgtagagatgggacttgctgtgttgcccaagctggtctcaaactcctggactcaagccatccttccgccttggcctacaaaagcattgagattccaggcgtgaaccaccgcaccctgcccatatgctttttgtaggaactcctcagctctgctgttgtacaatagaagtgccatagataatacgtaaacaaatgagtttggctgttttccaataaaactttatttaaaaaaaataggcagtgggccatagtttgctagcccccaattcaaagaaatacagattttttaaaagctattgggaaatttagagaaaaaaaaaaaacttttttagaacttttgggaaaggaccccttatctggctcccattccatttggcaatctctaaagcggccaaatcaaattttaagttaaagagtaaaattttgactcaaaattttatttgtccctgtgcagtggttcttaatatttatttgattttagttcctctgatgcatataatattcttagtagcagtgactcaatatagcaaagattttcaaacaggtagaggggctgagaactctggcctagtgacattactctgagttcattaagttctcatttacaactatgccttagcataaactatcgcagttaaataattagaatttcagatcggtcaaaatactttggcatctgaaagcaggagcttagaaccagaattccttctcagacataatcccagcatccccagcccagtgcttttgctctttcgcaccaggccagataactctgtgatcatggacgtatgcaggaatttgtaaatatttgatggatgatagtcagattgccaaatggcagaaaggtttctggttttgcagtttgaaaaggattatagagcggggaacaaggtaaatatctgaaggtctgcatgatagtacttcttttcctattgctttggagttattttttatacctctttacacaatgtgtgagactaccaaatttacattgcactgttccaggtgacttgtgcagttgacaaactatgacccagcatagcaacctaggcaagaggagcctatataattcattcttattcctattttgctatttcaacttgtttctgttttataactgcaagtggcctcccaggggtagcaactgttggcaacttaaagttaagccagtagttctcctcactccatatctatgctgcttgtctttgcatataagtgagtggatgctgggggcatggaaaaacaaaactatttaagtgtgggagaggcctgtgacttttgtagtcctttggggaatttttcacatgaccagggccaaatagttctgactgctcttgtgccatcctgggaatagagcagtgggatgtaaggagtgaaaggggccatggatcagtggttctcaaagtgtggtcctcagacctgcagcatcagcatcaccagggagcatgttagaaatgcagatcctcaggccctggccccaacctactgaattaaaaccttttcaggcgggcccacgagtctgttataacaaggtcttcggatgatgactgtgcatagtgaaatgtgagaagtaccgcttgattcatcatccagccagatctgtccagcccatttttgtgattgtggaaattgagggcaagagtgggcaggtcactttcccaccatgaaacagctagctcagggtaggtgctggccttctgattcccagtccagacctctgctagtcacagtgcccagccaggtatgctgtggggatgtcagtggcctcagaaagagtgacgacttgggactgatgtccccacatgctggggtcacaggacaaaggaaagggtttgtgactttgagctctcttcttaccctgggcaacctctctctctgtttaaaagcctggtgaccctgctgtgaacttcctcttttaaatgaacagctccctagagcatccttggctgagcttagcaacaaggggggagggagtgaggaggggtgggaggaaaatgggctcccccgttatcatgtcagtgcaatcactgggaattatggttgaggattaagagtcacttggggataattcagccaggctggagagggaaacacacacaaatacacacacactcacaacataaacagattgctaaagctcatggcagaaaacaaacagcataggaaagaaaaaaaaaaaaaaaaaggatgggtagaactgaaagggcctgaattttgaataggtggtataggttccagaatgatctgtttcctaaacacttttggtgaagttgtatacacagtgactagagcggagcagctgcttccccggttctgtgcattgctctgtttcagaactcatagcatccctctcctccaggcatctgttactgagaacacttgaagattctgccaagagaactcaaactggcaatagaatagttgaaatttaggaaatgagacagagacatacatagagatattccttcgcttctaagaagatatagcaagtcccacaggaaagtgttaactatttcctatatttaggtacctctgaaaaaggtcaaataaattatccatctcttgtaattatctttgggcttaaacaaaagacctcagaaagtcagtggtttgcttttcctagagagggtatgcaatttgctctatcttttttgacttagaatctgtacagttgctacctaggtttttattttcctgacatggtgggtgaatgtccaggcagatggacttctcatcaagcatggttaatgggatctagaagaatcttgtgctttcccaaagaaccaaacagatgagagcactctcaaacagagagaggaaatgatttgttcaccatctctgagaggcttgacagaaaattcgagttaggggagtggcatcgatagcccctcttggagccagtctgaggtgagagagctcccttcaatattcttatgtctctcacttcacgttacctgtaagggaataatctccatggtaggaagtcccttaccaacctcttacccagctaactcttgggccttaaatgttggttcaaccctaaaggggtggagacagagctttctgcgcatgagtggctcagggtttgtttgtgctttcttcatattattctgaagccaaccagaaaggactccttttttcccctccttttatgttctccctctgttttcctcatgcttttagacttgataaacaagagaagcctacgtattccatcttctgtttgttttgcttgaagaggctgactctatttgattttttctgggaagagcaattttccgtaagggagaaggtgcttggagaagtgggtggaagtgtgagctgagggggcttttttttccctttcctaattttcccctttagtgcctgagaactacagaatcctttccagatgaacaaacacagcaacagatgtggagtcggcaacagtgtattctggggttatttgggtctgtttaaattgggcttttcctgcaccagaggattttgtgaaatatgttaggcttctgaacatggagagatttcagcctcagattcagagggactaaggaattaattaccccattccaaaaagtccataggtatagatggctttgtatgaaggaactgctacctcttggcccagatcatctaaaggaatgggtctcctcttttctctgatccctaccggaactaggcgttttgtaatcttaatcttgcactttggattctgcctggaattttaataacatggtcactattagtgaagccagtgtgacccatttggatgctttcaggctgggagagggaagccgtgtcagcctcgggacaacggaacatcagtcctgcttgcctactgtggaggcacaagagaaagaatcctgcagtgaacagtcaggcgcagcccttgtcctccaggcacagctttcacaacaattccacacctttttgagagggacgcttttgtggtctcagatgtgggcttcatgtggaaaggcgaaaaggaaggttttgtttagcatagagcactgaaggaggagtcaggagcccttccatcccagcctggttctattttttagtatgtcatcttggggaattcatccagcctctccttctttagaagctttctaagcttctactgaggacaacactctccaattctttctcagtattaaacagatcaaatcaattattcgtattttatctcttctcttagaatcctagaatgtcctagagaaaagaaatctaaagaaataaccaatttaattataaacatgatttagcatctaaaaaaacatgttgatataactctttctgtgaaagagcaaccccattggcctttctccttcagtcccaatgaagaactgcagccatctttcggtgttcatggggattgcttcgactgcctgtccacacatactcaagtgatgaagttggtgctgcagaacccacgtttacaaaatgtcactcctctgtaggggcaggttttgcatcctgcaaatactgtattattgtgtatgtggtttttttgtttgtttgtttgagatggagttttgctcttgtcacccaggctagagtgcaatggtgtgatctcagctcactgcaatctccaactcccaggttcaagcaattctcctgcctcagcctcctgagtcactgggattacatgtgcccaccaccatgcccagctaatttttgtattgttagtagagacggggcttcaccatgttggccaggctgatctccaactcctgacctcaggtgattcgcccgccgcggcctcccagagtgctgggattacaggtgtgagccactgcgcccggccaaataccgtatttttgatctgcgtttggttgactgccgtgtgtaagtggacctcggcagtcaaacctatgtcatttaaggggcaactgtagaaagacctgtcactactaagaagtacagcactttacaaaattatttttacatatgattgtcacagtaaacctgtgaggtgactgtgtagtatccccatgttttggaaatgattagtaagtagtaaagccgaaaccctaaatatgggctgtttcccagctttctagaattctagttattattatttcccagggctaatttttactaattaatggttgtaaatcctagttattcgaataatcaactaggtgtctagcacttgctgtataggttccacttagctttctttctttcttttttttttttttttgagacagagtcttgctctgttgcctaggctggagtgcggtggcgtgatctcggctcactgcaagctctgcctcccaggttcacgccatccttctgcctcactctccccagtagctgggactacaggcgcccgccaccacacccggctaatttttttgaatttttagtagagatggggtttcaccatgttagccaggatggtctcgatctcctgaccccgtgatccacccacgtcggcctcccaaagtgctgggattacaggtgtgagccaccatgcctggccccacttagttttctttgaaaagcataaagatagtagagaaaaggaataatatacacggggaaataagaccagtgtatattcaaagatctgcaaatatgtatattttttggtcccaagcttgtaaacaatttaaaaaatgactcactttcctgcctttttataagctgtatctagttcatttccctcttccaaatataaatccctaaaggttaagagtactcttatttttaaggcaataaggaacagacaaagttagccttttcaggtattttcatgtagtcagagaagctctctccaagggagggaggataaaatggcccagtgccctcaggcctttagaaaacatctcatggggataaatgctttgattcccagcggtgcaggaggtaacagatgtgaggctctccatggcgcttaccagaaatatgtatgtactgtggggcagaacgaggtactttgaagattggagaattcgtcggccctgtgacttcactttattgctttcttcctgtgcaaaatgtctctggacccagagggagaggcaccggccagacagtgagtcaaatgacaagttgacaaaatggttgtaattctagaagctgcaatcccatccttgtctctttatgtaggggtgaggatgaagccaaaatctgaaacagctcccaggagagcaagaagatactgttactaatgattgggccgacctgaattctttcctcgtttatttatgccagtcgttggtataaacatctgaactgcatccacattcacacccatatctagcaacaatgatcttattaagaaagagccagctaagccatgtaacgtactctatacccactgtgtgcaggacgagcagctgacgtcatggtagaaaggcctcaaagtgacactgcagccattcctccttcttatctggagatttaatgataccaggcacaagatggggcagcagaatttgatgccgcatttgagccatgccctttttattaaggccagatctatgcaggtttggaaatggtatctatttgcattcatccattcgccttctaaacaaatgattattgaacacctgctactgtccattattgtaccaggagctggggacatagtgctgacacatggtcctgccctctagtttctcactctggcagggggtataggcaagaaaataggaactctcaaaggcgagtgacaggtgcaaagatatgggtaagcttaggtgcttttgtgatcaggtgggaatttcaggacgaaaagggaatggaggtttagattagactaaaggatgaataaaggttaaccaggtgaaatttgcatggggtttggaggtagggaagtggggagttggcaaccaaggaaaagagcgcgaagccctgaataaataagagagggaagctctgaataactcaacagcttcctgagctacctgagaagcagctcccatgaaccagctctcttctgttcaactgtgtgctaggtccttgattcccataatccttactgtgtgctgggcacatgctggcctctttatatacaggatttgctacttcttcccatcctattatgagtattatgatctccattacaaagacagaaactgagcccttaagagcttaagtaacttgctcatggtcgcacaggaaataaagccacaaaaccaggtttcaaaccaggtctaattcaaaacacgagctcttcaccaccaccacccaagagtgcccaggcgagcaaatgtaaagctcgtgtaaaactccctagccagctcattgtggataagggcaagggttattctgctgggtatccagtgcctcagagcagagcacattataccttctcagtaaatatttgctaactgatgctctatctctgtcctttttttccatccctatcacaagagtttagaaaaaaattcaacaatgccaatggagttatgcattttttacctaattcctctgaaactgagtaggtaaatcagtaggagatgaactagtcgacgtagctactattaagagacccttgaaatccttgcacgatacttggtgatgggagtgggactgtgactggttaagagtgagagagcatatcatgccatcaggggaataaagtcaggcttatgtcatggagaaagctttataaactcaatgaatagtatagtactgtgtctacgatctggcaatgaaataagtgatttaaatctccttaattgatctattaatagtatcactgttatacatttccattttttaaatagtaagtaccttttatatgagaatttgaaggcactgtctaaatgaattggtggcatcatttctgatgctcacaaagataagatatgcaagaggatggtcttgtaatagtcgtagattagagctagtacttttttttttcttttgggaaattaggaggaggatggtaataagtctgtaattggttagtaagggagttttgggcacgtgaagctaagaaggcagagtgggaggcatgtggacttagtcatttaatcacttgtacctaccacttgtggaaaggtaggtaagttattcattcatatggactctgggttttcttatttcttaaatgaggattaaagagtggaccttgtagagctgttataaagtttagaaatagtatattagaacaatcagatcattgtccaatatgtggcagacatttaagcccctgattccatgagataggtaggcaggtaggtaggtaggtgggtgggtgggtggatggatagatagatagatagatagccataccctccttcaaattgtccctgtgtaggctgtgccctggttgtggtacagtttctggccattaatagagtataagagcttttacaccaaagtcagagaaatgtggattcaaagcatgactttaccactgttactatgacttttgcaatctccttatcctctctgagcattggttttcctctctgtgaaaggatcataatagtatctgcctagaatagttactgttggtactgaatggcagaacctgtttaaagcctttagtttgggccaggtgcagtagctcatgcctgtaatcccaacactttgggaggccaaggcaagcggatcacttgaggtcagaagttcgagaccagcctggccaacatggtgaaaccccatttctactaaaactacacacacacacacacacacacacacacacacacacacacacagagccaggtgtggtggcacgtgcctgtaatctcagctactcaggaagctgaggcaggagaatcacttgaacctgagaggcagaggttgcagtgaaccgagattgcaccactgcactgcagcctggggagagcgagactccgtcttaaaataaaaattgtttttaatttaaaaataaagcctttagtgtggacttggcacatagtaagtattaatagatgttaattactaccagctacttttttcttattatccagtggttacttcactaagaagtaggtatcaggctttttccagtacaagagtgcttgctctcttcaccgaggtttgttttgcaagcaaggttacagttcagtgtcattgaggatgtaacatagccactatgcggagaacagaagacaaaagtggtgggccttcaccctactctctgctggtacagaagaagtagaatattcaggcaagagggcaggcctgcatgtgagggtacagaaatggaagcgctacctttgtaaggtagttgaaaaaacatctaagggaagaagagatgcttctggatggagtgagatgggagacttataaagaattatgggcattagtttttattttagggacctaacagcacagagaaataaaaaggcacatttttcaaaaggaggctttccttggaaagcctgcatctttcttaggtaaacatggagagaagtgtttacaaacagcttgtagttggcagtaggcttctcagttgcaggcatctgttttctgttccctgtagccagtgccacctagacagagggtcatggctttggatggaagggcagtatgggcaaaacagtttctgcctttcacgttcataaccctatctaggtacccatagtcgagaatgaaggaaacgcttcaagtttctgaagatgtaatcatttatctggacgtgtctttcaaggtaaatggcaaatgactgaatccacaattcttcagttcccctaaacatgtcttcttcattaggagcctgaatccggtagggcacccgtaatgtgctgtccttctaaaatcatttgtttgttctctctccttatctttctcccctcactaccctttccttgcccccaccacaccccctgtattaatatattcccccttgatcacacctggtatcatctacgattaaatattactttaacagctgacaatatctcaagccgtgctttaaggaggtatcattctacttaacagcgtcctgtgcctgctgatcccactgcagtgttttctccgtttaaggcattaccgcaacaaaatcggttttagtgtttcccttgcttctccatgctgaattacagtcacagtcaacggcccacttgtgtgtagttcaagaagcaattaagggctttttttttttttactttgaacaagcaagggagagggggtagagtgaaaaatgatcattattctgatgattcctctgcttagctgaacagttcacagttctttgataccaagagtcacccacatttaaacccatttctgtaactgcctgctgcagccatgcctgctgtcagatccggttgatggcagttcaaggactcacatgccattaggttggagcagcccaatctggctttagaattgtgattaaatacagttgtaacatctgcacagtgatccacggcatgatgatggtatcactgaaaattaaaaagtgcaaactttggagacttcccagggaattttgcagtttctattgtaagccttttgttttattcagtgggatttcttataatctgaatatggtagtcttatctttctatgcatgtctacatgaattaagtctatctttagcttgcacgttcctggaaggcagggactttaacttttaccactgggtccaaaacagagctgatgatagaagttgttgaaacgttttttttttttgagatgatcaagagatgccctccttaatgtttgctcaataagtatctctgctctgtgtggagcaataagtgagatcctgggaagagacaagtcactttatgttggtggatcgccgagtgtggtccctgaaccagcagcgtcagcatcacctgggaatgtgttagaaatgcatattctttggccctaccctcggcaactctgggggtcaggccctgcgacctctgctttaacacaccttccctggcacatctgacgcatgctcctgtcagagaatcacgggtctgcatccctgcaggtccttgaacccctccacagacatttttcctgcaaagaggagagagatgacctagggtagaagcagggctagagggcggggactaagctttgaggaagtgaaggctggctttgagacagcctcccagctgcctcagcagggtaacaatgtggcagcttctctcctttggatgctttagggctgcctggcagctccaggagccaagtaattccacaagcccgtatggggagggtgtgatatgggacagttcttgccttgaggggaatgactgcttgcttctccactgcgtgtgtgtgttgaagcagggaagggcactaattcttgctcaaaatctaagcagctgtggtataacgcgaggaggtttagacatggaagacttgggtcaaggcacagctctgctctagtagctttgagactctgggaaaatccattaacctcattagactcagatggacctgagttttctcatctcaaaaactgagataattatacctgccctgtctctttcataggatgttctgctcagttgagataggggttgggatgggattttgctcaacccaaacccttacttctccactcaaacagattcctgactgaaggtgccctaccaatgagaagcacagactaatggggggagcaaagttctttactgattaattaagctgatggatctgcacagacgcacacccactgcaggccttccctaggaaggcatggtcgaacacaaggctgagtcatggcaactcccttcaaggtgaccttggagagcagggatgcccttttgcctgttgcttgaggacattgaagtctgatggagagagcctcctccctccagattcctaaagctcccggactttctcaattcatggtgcttttgtgtctgggaactttttcacagtgcccctgtaacaagagaaatacctactagctccatttgttagtagtttcaaataatagtagtagtccatgctgaatctgaacgtgccgctgttactctctggaaacttttttttttttttttgagatagagtctcactctgtcacccaggctggagtgcagtgccacgatccctgctcactgcaagctccgcctcccgggttcaagtgattctcatgcctcagcctcccgagtagctggtattacaggtgtgcaccaccacacctggctaatttttgtatttttagtagagacgggatttcatcatgttggccaggctggactcaaactcgtgaccccaagtgatacacctgcctcagcctcccaaattgctgggattacaggtgctagccaccacacccgacttctccaaggaaactttaaaacatcccatggctttcctgtgagttagttgcagtccacagtttggcctgtacctcacctgaagcaaaagatgggagctagaacattgagaaatattcccaggagtctaccaccctcatgaactttcccttggaatagtccagtagaataatgattttttaaaaattattcctataagaaggaaggataagcattgacagatatgacttattcccttaccagcatttcaaagtcagaatcaatttcaagccaactctaaacccatttgtagatatactgcctgtggcttagttaagaagaaatggtttctttctgaagtaacagaataattgccatatccagtatctatgtctgtgtctgtatcactgagtggattgttggctactgcggggcagggtctgggacagagtaggtgcttgtatgtttttaaattatataactcctttatggatgacttatgggttctcaaatggcttctctaatgggcaccagtcttattttcctttgatcttgttcttttaggcttgcaaagggtaacgtaaatatatccagcactgcagctaaggcttcatatacagggacaggcttatcctctcaagcgttcacaaggggaagtgagatcaaagtgtgttggcatgatggtggggggcctggaggagcttttttgctcttcatgataatagcaagcacaccctgtggatttgtatctaacccccattctgtagttgacattgttcttgagtagaaaaccactgaagcccaccagtggttctgagccaccccacattttatcattaagctcagttatgagtggtaagatgaaggaaatagtatcttatgttcattaaaatggactgcttgttattccagaaaattaatgtatctgaagccagggcatgccttttgaaatttagcaattgattcagcgatgcttggcatttagggtgccaaaacattgtggagaaattgagtaactccagaaaaccccaacatctttttttcttttaaagtagatctaacatggattgcctgcctctcatctaaagatggacgaagcataattacattgatgtaggaagtagcttgggaaggcaagatatgcattcctatttaatggttaccttactttaagtcgggtacgtgattcattgagatgcgaatttgaattctgaggttttctcaactctgcacaagtctatttccctgtattccctaagcccatatcactgaaactcccttaggtggaggcaagtcacagccctacagtaaaaacagtggcactattgctaggcagttcatgccatttgcgaatttgaaccccgatgacagggctgtgaagaaatgtgcctagataagcttcactgcccattccaaccctgaatgagtgcaagcttttgagatgtgtgctactaaggatcccacatggtggattgagtgttttggttttaaataaaacaggagcggagttttaaataaaacaggagtggtaaggaagcttgttgtgacaaatggtatacctgcgccctgccctctaccttgcctcacaatctaacaaaagcctttggcttacgaatctcaaggaactgctcagaggagccgtttacagcacagaagcaagagaagagagaccatgtccggcccttggccagttgtacttcagtgcagacatgcactgtctgctctttctcagcttcttttctacagagagttaagaaaagatgcaattgatggtggcgaaaagtggacaggaaaccctccgttttcaaagtcttcttttggtgcaaaactaccttaggtctacccaaacataaattcctggaattcacttttcctggaactccattggaatgcaaacactgattttgaacacctaacatgcttccaacacttttattatgggccatgccctgttctgagcactgtacatgggctttactcatttaatccttaaaacaatatttcaaacaatgaggcagtcctaatactgcattccttgggttcttcttagggtcatatggtagcctcagatatatgtcttgacccccattagttcacaaaaatattttttctgggagtagggctgtgttttataaaataagaatggtttataataaaataaaaacagtgtagctcacagcagctttttgtcattcaaaatgtatagaaaaaaagacaccaacttatacaaaacttcatttgggttcttttaaagttttgttgttgctgttgttgttaaatggtaggccttttgagatagatttattggaaagtcatatgggtgtagttcttgggacagatgatttctccattcagcatttagagttataacttctgcactctagtgattcttgaagtagtttggaatatggaaatgtgaatagttttacctccatcactctggatattatcccatgttctaaaatcattacataaaaatataaactcactattgtccttgtaggcttatcatgtacttatgggctcatcaatgccaatgtccattgagggaactgagaagagggggcatatacaggtaatgatgtcttctcataaaaagaaaaaaaaaaggaaatgttttggcttttctttagtaacatataatttgtaatgttctttgcctcattcacaatcctgtccgtgtataaacagtaatttgctcttgtaaacacatactgtagttagagttctattgggagcaattggtgttctttatctgtgacatcatgagcatttaaaaaacaataattataaatatcctccagggtgaaaaaatagtaaaaagaatcagaggatctgtctagagactttagtggttgtttcttactgtcctgtctttgagtatcctccctctaccccatctctactcattcactataccctgtcccacccaacacatccttcaaaactcagtagggagggtacctattgcaaatctccaggaatgttattactatttggagaacagtatttagtaacactttgtctttacatctaaaataatttgttgcttttggtaaccttcatctcagttctgaaatccaaagaataagcctgttcctttgtatggctcagtgaattgtgggtcctctcttcccctcccctctcccccctctcccctccccacccctccccacccctcccctctcccctcccctctcccctcctctcccctccccacccctcccctcccctccccacccctcccctctcccctccctacccctcccctttcccctccccttccatccccaccgcttccccctcccctcccttcccctctctcctcccttcccctctctcctcccctctcccttcttatccccacctcttccctcccctctctcctcccctctcccttcttatcccctctcctcccctcccctcccctcccttcccctcccctcccctcccttcccctcccctctcctcccctcccctcccctccattcccttcccctcccctctcctcccttcccttcccctcccctctcctcccttcccttcccctcccctcccttcccctcccctcccctccattcccttcccctcccctcccttcccttcccctcccctttttcaaatccaaggatgtaccagtgaagtcaaggtttgtgtttctctgaatgctttgacttagaaacaacctcatattggtaatattggttagtgctacatatgcataagcatgcagaagaaaaaggataagtgtatcaaagacatacttcaattcataaaacttgcaattacactatggcttttcagcagaggagtccgttagattactaatggggtatttacagaggagagagcaaaagtagaatgtaatctgaatatgtaaaccgcttatgttcttaaagtccaatttatacccagttttttgtaacttggaatgcatctccaggtagaagctatattttgcatgcttttgggctcccctgctagcttatgaaaacctgtgtcaagcataatgtagtaaatatggtttttgaaaagagtatgaaatgttatcagatagccttcagtttgagtacaaactccaacacctactagttagatggccctgggcaggtcactaaaccttttggagcttcagtttacccatctacaaaattcagcatgtgcaaacattttgtaagctaacattgcttttttgggtacaacccagtgtttgagatagaatagacattcaataaatgtttgctgaatgaatgagcagatgaataagcatgtattttatttccgtggaaaaaatctgtccaaaggatcagatgcctacaacttctgcatcctcacagtggtgagtttaggccagggtctacagaaattgagacttcttaaggagatgttcgtggctgcttatatggtgttggggtctcttctaccatacctggtggtggatttctagctgcagtagcttcagagtcaaggccaaggcatttgccatgagtgagtcatcttcggatgagtggctttgctagaaggtaccaggtatctaggatcccatgggggcatacgggtgtgtgtgaaaacctttacaggctcctataccagtagttttgcacatcagagaggtgtggtcgccatttttgtatttgagtcatgcacaagttggatgcttgcaaatcgaggactttatgtattcttctacctctgtgaaatagaacaaacggtataaaaacagcttttaatagaaaacgtataacatataactacatttttatgggcccaaagggagtagattaatgcatttaaaataatgagaagaaaaaataaacatacttttaaaaacatcaaacgatggtgttttctccagaaaggagcaaaaagatacaaggtattagagactgtgaggcagttctgttctgactttgggaatggactttgggtttattctaacatgacccctgcttttctaattatagccagttgtgctcaaacagacaggaggtggaggagttcgttttaaatctatcttcggtttcagtagacatacctcctgaaaatccctaaaatttcaagaggagattttcttttcttttcttttcttttttctttccttttttttttcctcaagcaattgctgttttttgagctccaagggctgacagctgttctagttttgcttggggactttttcacaatgtggattaatcaatgttatgaactgggtccgtggggttttgggaatgtaattggtttcagatgacactttgctagtcaatctgtgaaacagccgaatgttgacacagctgaacaattccagctgtttccactcgccccttcctctttccctggacgctgcatcctatgcctttatttttgtctgccctctctttttgtgactttgctaaactaatttgttatcttttctgaaatttctttttgcttttttctcctttgggatggcatagctccctgtttattagattctccacccaattttatttgcaaaagctttttcttcactgtcatcgtttttaaagaaatggcagtttttaccatttaagttcttttaatttgcagtgatcaactagtttatttatttaagggcacacagctacaaatgtagattttttacataagtgcttagattctgcaaatatttggtttcacagctggttgattaatcttctttttaaattatcagaggtgtaccattgaataaacaatacaagcttttagcttcatccactgcatagccatttttgctatcgtatatccctttgaaacagtgagaaaaagagattcagatgtcagtattactgctagaaaggtggatgattagaaggaaggaatcaaaagaagacccaccctgaattacgtacagtatattaagagtttctatattgtcagggggaaatggttcataaattgctttcagtggttttccattatcagactaatttctctttgttttttcaagagtacttgtttctgcatctcactgagtggagaaatggttttaactgcttgtgtgcccaagaaaatttttgctattttattgggtgacttgttgcaggtcttgagctaaatgagctaagctaaagcttatacatgggtgaatgtggtcatttccagtacctgagactcctgatgtgagcaaagaaatcctgttcttcccagaatggtttatattgactaaatggatagctcagctttatagaacaattgtgcaaccacctactctgctttgcttgtatacatttagatgcccagagcaatgaaatattctgaagttgagtccaggatgtcaaggaacatggaacaattgaaccattatcatgagactctgacaaataaatgcaattgacatagtgaatttttccagctatttccttccatcaaaattgttaatgaccgtaatatcagaggaaacactctcatgggtggaggctatcttcaagagaggaaacagtggttagatatacaatgttacttctctgaatggagaactatagacagtgcacaccgttaagcattggttagagctaatccagtttaacacttctctatacgttttgtgtagtgaaacttctgaatctttctaagagagaaatacaaagccatcatgggccaagtgtgttaaaaagagactgaagagcatccatatgaaccaaacctatggaaaaagaaacacctcaaattacaactggaggtgagcagccagaattataggtgataacctagaaaatgggcttataaatcatttcagacatttctccaaatattttgaccaaaatatggctttggttcagagacctagtgctgggtataatcatggaggatgctggaatcaaagaccaaaagcatatctctgaccctctggccattcataatatcatctacagctagaccaatactcctcaagaacaacctaacaaaaccaaggaaggatctgacagggctaaagtagccaagggatttcagatattaccttggaagggcaaacgcatttagtatcttttatgtaggaagctgagaatggatgggatgaacattatagagcaggactgcataaacttggacttgttccttgaacctggcagcagtacatatgtatatattttgagggtgacagcatgttgtaccggatgagaacaccagtgtttaaatccttgtcccaccatttatttgtctggtcttgggcatttcacctaatcattctgattcttgattttcttatctgaagaggaaagaaataacaatcttaaaattgtttttaaaatcattaaatgagagatgcatgtccacctgccataatttttgaaatttataaaagtatttaacaaatggctaccattaccctcgttgtcgacaacatcattagaggcagttttaagtgaaattgcacaagttgaaaattaatgagagtttaaaagtttaggccaggtacagtagttcacacctgtaatcccagcactttgggaggccgaggcgggcggatcacaaggtcaggagtcaagcctgactgacatagtaaaaccccgtctctactaaaaatacaaaaattagccaggcatggtgacatgggcctgtaatcttagctactcaggaggctgaggcaggagaatcgcttgaacccgggaggcagaggttgcagtgaactgagatcatgccactgcactccagtttgggtgacagagtgagactctgtctcaaaaaaaaaaaaaaagaaaaaaagtttagactaatgcatacatacatagataatatgtcaataatggttaacttgggagagctagagcacttgggctaaatctttaacctctgacattgaaatcagggttacagccattcttttccacaatcgtacctttaatgcagctgccaaaaatgacagtgctcagtggaccaaggcctaggctatccacctttttgggtttttttttttttttttttttttttttggtcttatgaaccctttcctttcatagcatgtggatctagaagaaggaagatttggactctttggacttgagaaatgacatttttacctacttggttccaaaaagagctggaacttcttgaaagggtattctgtgttcttaaggaacatgccagcggggcatagtggctcgcgcttgtaatcccagcactttgggaggccaaggtgggtggatcacctgaggtcaggagttcgagaccagcctgaccaacatgcagaaaccctgtctccacaaaaatacaaaaaaattagccaggcgtggtggcgcatgcctgtaatcccagctactcgggaagctgaggcaggagaattgcttgaacctgggaggtggaggttgcagtgagctgagattgcaccattgcactccagcctgggcaacaagagtgaaactccatctcaaaaaaaaaaaaaaaaaaaaaaaaaggaatatgccctgtcttcccacaattgtgcaagttgtagactactcacatctttgtcactttggtcctaaaaaaagtttcccagatgaaagaaattttatagtacacatgtaacattcttaagtttcttttctgaagtgttattacggctaatgaacacatagcagagtcatgttcctttctggttccacaatgcctgtctaccaccatggaatcattaggctgtgtttgttaaaagttgatgagtgataggtgaaaatgggaagctcctgatgcatgtggaatgtagatgagtgccaatataccattgcaaactgggtctttacaatcataaaaaccactagacgcattagtaaatttctcagacaaatagacataagtaaaaggcccaaaccctagcccagaagaggaaaattgagcatgggattcagttgttggctttccactgagatatttcacccaagttgcaaccaaccttgaagggaacactgaccatggtagaaagataaattgcctgcttttggggtagaatggagaagttattggagaatatgaaatgtagtcagattaaaggagtaggatcagagtcttgcatgaaagttaggggttatgcaatggaaacaaggtcttggcaggtaatttttgtgctctaaaaggtcctttctctcccagtgttgcagtcaaacttttaccagcatgagctttatactggattctttgaatgcaagagtaggaagcaaccaagatcaaacggcaccttaaaggtagaacatccaggtatcccactctgccccatattctctgaccagcctctcccaggctagtattattgtcatctgaatctatttatttattaaagagatattatttgaataccttttttttgttttattcccctttgatgtcctcatggagctagtgggattgcagagacatggtttaaccagtcaatgtggaaaatagaagcatcatgaagtgttggaaaagagaagaaaagggtgggatgagcatttatagtaaggactgacttacgttagggaaggctctcatgggaaaatggcagtttaacttagagtagtaagaattaactaggtgaaacagaggggagctgcagatgtaaagatgatacagatatggcccccaccttcaaggagcacgtagtctaaataaaacagttacaaacagttatagtacatttgatacttgctacctgtggtgaagatttttgtgggcatgtcatgttattacctaggaggaaaatcttaaacagattctgtggggaggggttacctttaaggaagtcttcctggaagaagtgacatttgagctgagtttccagtgataacactattgttaatttgtgatacattctggagccttagatacattgctttctcaattgctttggactcaagattctccttgcttgatgtactgggaacacttagtgattgatgttagtctctgttgctgggagatggggaagagtgagttaagtagctcagggcaggtaatgaagcagcttcattatgtgtgaagggacagggtggagtggggaacttggggaatgtttattgctcccaagttggcttatagcctagaaattctagagttctgcttctgtgccaagaaaggggatggggggattgggcagtagcttttcatgcttcccaatgactgggggaggcacagaagcctcaattcatgtaatgctggtcctgcaaccatctgcattgtctccaccaaagctatccatggtaaatctgagttttttttcatgttgtggaccactgacaccagaggaatttggagaggctgttaaaaagagcacatccctgggctccacagtagacctgcagaatcaatatagagcgaggagggtcagcatttttaacaagctccctgatgactctcttggttctaaagtttgagatccctgcagtttgcttgtgtgggagtagtaggttatggtccaggtataatgggatgtaacttgacggtctaatataaagccagtaagagtgggtcatgtaaatgtgcctttgtattgcaaggcattgcaaaaataaggaactatttaaatatttggcactacaaaggtacagactaaaattacctggacaaccttcgcggatggaaactgtgactcaagtgaatcataattgttcttgatgatgtgatgtgagttggtgtctttcccttcaaaatgtgattgcataattgcacacaggcactccctccctgtaggcagagggctaattacataatgtgggcaataggcctgatcactctgtcctctaattatggtttataaaatgtactgtgttgacttttgccatcacagctgccctcgaggttgactctggaatgttgtggctggtatgggcttgatacattatccagcactaactccattcacactttattctgaagcgagaaagagccccggcaaggtgatctgacgtgcccacaccagacggaaggcagttcagcaccaggacaagaacttggctttcctagcattttcccagtttcagtagctaggccaaacgtgctctctattctgcaatgctggctcatgttttaccattttcacaggaaacctgatttgggaattttaaatggaaaaactgtcatttagtgttctttttcttttctaataacaatagttaatattgaccacacacatgtgccaggaagcactctaaatactttatacccatgaaccatctaatctcctcagcaggcagatatctccatttcaaagatgaagagactgagcctttagaaactttcaagggtgtttccaaggatatacagtttaggaggacaaagatttcacccaggctaatctgattctaagatattattttacattttattgcactgttggttgatcatactaatgtacaaaaattcattttgtacagttgcaaggtcaagtgatcttaagttaattccttttcacatttagataatgaaagataaaatgctttatacatttactgtataccaggttctaggtaactgtttcttttatcaagttacatttttatattccagcacgttctcactgggcagtggcttctgtctgccttttttctctatatcttttatatattcttgctttttataaaataagataatctaaaataaagagaagccatgttttctgtggagcctgaatttgtagttaggaacatcagcagctccacgccgtgaagggttcagatattattgagtctccaagggaaggctatgttgctggtggtgccattaagtggcgtgtcctgatttgtgggcttcacagggccagcctggcaactgcagttgtgttctccaggtcagggagcacactggtgaatacgccgggtctgtgagttcccactcttcatgccttatattgtgatcttttctttatgtggtgggatctcaggaaatatactccaactgtgtaaattctgtcattttcagattatcataacttagaaaaaaaaacaaatatagaaaacaagagttcatgtgaagtgggatgccttattctaccacgtgcttcatcacagactatttctggggagcatgtccctgaaccttggtagtgagcatggaaataccctcactcggggatggagactgctttttcaattggataaggcactcctgttgcatgcctgtgcagttgggagaggagggagcgtaatcactctcatcactccagataggaatgctgagcatacattgaatacataaattaatatacatatgatatgcaaatgctcccagagagtcctgaaggccgcccatctgagaagcaggggtcacagacatgctatgcttttacccaagctgtttcctctgcctgaatcactcgccctgctcttctctacttggctcgctcctcctgtctctcaacactcccctaaagtttccctcctctgagacctcttccctgactccatccaggcctggcgtccggctctgctctgctcattctccaaggagagtggcacagagaggcaggctgcagaggaaatacagaatcaaccatgcagcactgcagagagtagagggtggctgaggctaggggctaggggagcaagacaggacctgcatctcagggaaaggactaagaaaaagacaaacttgggaagctgggcccagagccgtctccccagttctgtggcttgatcaaacagaacagcaaaaaccctgtgtggggacaaggcctgtgtccacattgaaagcactgtcaggcattcagagccaagaagacttggtgaagaggtggcagtgctccatagggtgggggtactgtctttacctatagtatttctattcctccaattaacttttttttgagacggagtcttgttctctggcccaggctagagtgcagtggcacaatcccagctcactgcaacctccgtctcctaggttcaagggattctcctgcctcagcctcccaagtagctggcattacaggcgcccaccaccacacctggctaatttttgtatttttagttgagatggggtttcaccatgttggccaggctggtctcgaactcctgacctcaagtgatccacctgccttggcctcccaaagtgctggggttacaggcgtgaaccaccgtgcccggccttactaacatttattgagtgcttcctatatgcaaagtggtgatgcagtgatgcttaacaccctgtctctagagacccatatgcccaacaactaaagcagtagtttaaatttcctcttaactcttgcaattagagatagattatgtaaacctgaattatttttaatatacctaggaatgaatcaaccataaaggggcttagaggttggtacgtaagttactgaaaatctgggaattacactttagaatgaggggcgaggtcagaagtttgtctatcctggcctaccaagcccctgctcacagcatccatagctctcaggtcagcaacaacagatatgcctggccgcattaccttgacatcaggacttcctgcgatgcccttgtatttatttatttatttatttatttatttatttatttatttattttttaagatagagcctcgctctgtctccctgcacgcctgcagtggcacaacctcggctcactgcaagctctgcctcccgagctcatgccattctcctgcctcagcctcccgagtagctgggaccacaggcgcccgccaccatgcccggctaatgttttgtggttttagtagagacggggtttcaccatgttagccaggatggtctcgatctcctgatcttgtgatccgcccgcctcggcctcccaaagtgctgggattacaggcacgagccaccgcgcccagcccttgcaatgccctttaatgccaaattccagggaggaagaacagcagctccttcttcagccgtgaggactttgaggatacctgcttttagattcaggcttgacattttatatcaagcttgtccaacccatggcccatcggccgcacgctgcccaggatggctttgaacgtggcccagtgcaaattcgtaaactttcttaaaacattatcaggtatttttgtaattttttttttggctcatcagctatagttagtgtattttatgtgtggcccaagacaattcttcttccagtggggtacagggaagccgaaagattggacacccctgttttccattgtcttgatgtaagattccagccatttttctcctttcactagaaagagtgaggtggctggatcactgaagcgcatcccaaactgccttccccaagagtccttggcatgagaaagctagaacctcaccccagtgagggggtccacagtttccctgagcagctcacattggttgggagtcaggagaggtgttatttacctggatggggtctcctcacttcatcccctgctgtgaacctcacggtcacccttgcccccgacccctaccctgaggtgtacctgaaaggcacccatggcaagtgcctgctctcagggggtgctgtcatgacagccacctgaaaccaggcctggaagaagggttcctgcaatgcattaactctcccaggagcagaatgagtagtggaaggaaggagagccaagaggaacgcgggaaagagatgtccaagtaccagggacatgtttgccaggcacgcactttggcccagcaggatactaggcgtggtggagatcctgagaagtgtgaactctgtctctccctgaaaggatttagtttacaatctattcatttcctgggtttgactgagatctggaaccacattgtgctctaggcaatgaagataaatcaaataatacggaaacccctccacctccatggaactagtagttgggtggtgcttgtcagaaaggctttcttcttcttcttcttcttcttcttcttcttcttcttcttcttcttcttcttcttcttcttcctcttcctcttcctcttcctcttcctcttcttcttcttcttcttcttcttcttgttcttcttcttcttcttcttcttcttcgtgtggaactgttttaattcatcctttacattttttccatcctttacattttaagaattattttattattgaaagtaaccaaatccctttttcttgattagagtgattggctgccaaaacgggaactttgaattcactgtcatttttctccttgataccatctgtccttttcccagctttcaggctgagccctatttagggacaggacacattaaaaaaaaattgagaagaagaatcttttattataactcataaatagcaggaaatcctgggctctaatttcctactgggaggaaagattctgttgatagaaatggcaataacgtatctcaaagcagattttgtatggagcaaggaagatttctacaaatccctattcttccagaaacattcataattccttatacaatggtcttgtaataaataggtacatttgaataactctatgctactcagggaacttaaagtgaactatctttcaaagagtaacaattaaatattatctacagttgaataaacatcactctaaggtgtgcagtgaacatctgatacctgagatcatctacacatggccccattggcctacatcttatgtttctctcagtaggcaaggatcttggttgttttgactctattacagcaactgggaatgacattcctctttttcctcctctgcctacataggggcatcccctgaggctcagccactggctttcttatcttctctctgcactctctgtaggagactataatctgtcttcagagctgtaacatccctctgcccattggaaaggaaaggccatgactgatagacattaggaggaagatgcaggagtatttgtgcactattagaggaacggcagaggtagttagtaattaaggaagaaatcaaagatgacctcactctccaaaatttcaacatttatcatgcctgtggaaatgctttatcaccgtaaattcaccatattttacagatgactacctcatcttcctccaaaatgaaacctgcctcgtacaacaggtatttactgaccaccccttttgtgttaggcgttgggctttggatgcttaaacatagaaaggccgataacatagagacgttgtccttgcctagtttacagtggaatgagcagcactgccacgttatgatacagtgtgatgatacagtgtgttctatctggttaagatacaaagtgctaggccctagacagagggtctcctgaatcccctggctctgtgaacactggcatcattcttcttctcactccagcacaaaggcttagttatcagcaattttgttctgtcctccccaactcaccctttgatattcaattagtctgtaactttcctgacgttcttcagattaccccttttgcttacttctatcacagacctgaacccagggccttaatacctcctacttgggctaagttccttgctttctaagctgatttcttcacccctgagctgacttccttcaaagttatccaggaccctgtagtaagattaatgttccctaaaacatttccttcttcctcctgaactggcaccgcctgcacattcactcatccaatggttaagggtgccaagagtggctcagaagctccccatggaagaactccaaaactctagctttcttctgcctggcgacaccctgcctttctgatctatatttccctcatctaaaagtcacctttctactagtgctttttcctcacaatctcacaacaccttgcgggttcttatctcctcctttgctcttgctcccctccctaccaggggaccccctgccctcatcacagtctgattaaagtccttcctctttcaggaggcctccccaactactcaagcctgtaaggggcgaggactgagcagcagaaaacatcctactcagtcagcagcaagccacactcatgtaagaatgactcgcaaaatccttagtcccacaggatcttttgctgaatctcctcttaaatgcctttcaggtctaaatgcctgtccttcaaacttccccatccgtagtggtcttttttccaggaggatggattcctgaatgaagagagagattttagaagtcctagagtttcaagccatctacttagatttatcattgctctccagtaagtatgagtggggtgctcagggttaagtgctggatcttgatggtggccctgtacaaaggctagcacttttccatggtttctcctccccttgcttccctgtgttgaggagaaacgaaagagacaaagaaacaagaagtttctatagatgtctgtgtctcagaggtggtcattacacactgagtgtgggggtgcaagaaagatggtaccttagagacaagtaagtatttgttgttactttcactatgacatgtcagtgttatgagctgactccaaatttcatgtgctttcagtttaaaaatgcttcatgacatctaaagaaatgctgaaggcgcttgccttcccagcagaaattctaaacatgatcattcccagaaatgctggcagaaagatcacgtgtgagtgtggggcataaaagtcaaatgtttgtgtatttctgcattggggggcttgacaataagaaacaatattctgactctttcctgtatttctcttttatactagaatattaaaaagccaggtataatgaagtgcataggagctaaatagaagcagctttgaataccttcattttatgtagatgttccaagagcttgcccaggcttcctctctctcccttcctctctctcccttcgcctgtcgagtctaaggagacctggcagcctgagatacccttgggtgttcagggagatcttgaaggcaggcgcctttgaggtacgcacctaccaaaaatgtcacatcaccaccggttctgttgtttcacattgaatgtgaaagattcactaaaaggttaatttccagtcttgtcaaatgtagatcattaaaggcatcgccttttcatggtacagctgacaaaagtcaggagccaagagggaaggcagatgcaaaggttgaataggccaaatactgtgagaagccctttggaaaaccacatcaggtatttttatctgtactcagcagaagtagtgattggtgactatttgcggaaggaaactggacgggtgtctgcctttttaaatgttaaaataggccctgtctattctaggaatggttttgataattattttttcattctttgcctttattctagaatagagattgcccatattttaaaaaaatgcttttcatgtttctatttgttttgatttctagaaccatgtttagatgacaaaaacaccagattgaaggatggtccatctggtatctttggctttcataaaagccagtttgaatcacatcatggttgatccaatggctggaaaacacatatttacccaaaatatggttaattccgtacttctgaataatcctgggttttgacttcttcagtttctccccttttttactttcttctgtttgagaggcactgtgaatagtggaaggagcatgggattcagagagttccagataggaattttagtttttccatttaagagcaactgcctttggacaagatgcttaacgtctctgaacctcagcttcttcatctaatggaaggatgccaataaccacctcacaggatttagggtagtgctaaatgagaaagcccatgtaggaatacttactgtcggagccagcaaattcatagcgcacactccaaaacgggtgctcactattgacaatgtcatttcctggtttcttattttttgattagctcttttctttaatctgctttcattcttaatatgtctcttttcctttttaaagcatagaagtagtatgtgggtcttttatgaatttgggttgatagctgattaattgaatatttaagagttgtttattgcttgtaaacagcatggttttctaagacattgcatttaattaaagcatgcttttcaataacactagttaccttgaccaaactggagttactgcttcacataaaggactattacctgtcaagagacatttactctgctggatgaagaactgaggaagagtgtcatgacgttaattatttaaaggcacttttctgaaaacgtgtctcaaatcctaatgattctgttctttgcctataaacattagcgatgccattctacacttttcactgaaatggttctaaaaatataggagggaaattttgatgtgtgataaaagttcaggatgatcacatttttctgcctgtgtacttttgcttagtattactttgaaaaaccagctggaatttttgaagcagcctccgttttgctaaagtcattttgtagggtgggcctaataatggcctggcacaggacctgaacatcgaaaacacctaaagaacctgacacacctgcaaggcattgtaggggcgggagagacggtagagaagtgagatgagtgtgttttctttgggaaaataagtgatttttgctgaacagcttaaggcactctgtaaacattagccaaaaaataaatattaattctcactgtggcctcggtcccttagtgaagccatgcttactccaggaactgctgcgatgaagagtggtgaaaattctgaatgaaaagcagccctcaaaaacgttaaaacccatgctattaagctttacaccaaaaaataaattcgaatttttaaaaagtgagaaatggggaaaagaagaggaggcttaggatggtcaagtggcacctttagcaccttgtacttaaccagataagttcaagactgtgttttaggccgggcacggtggctcacacctataatcccagcactttgggaagccaaggcaggtggatcccttgagcccaggagttcgagaccagtctgggcaacatagtgaaaccctgtctctactaaaaatacaaaaattagccagacgtggtggtgtgcacctgtagtcccagctattcaggaagctgaggtgggaggattgattgagctcaggaggtggaagctacacggagccgtgatctcacccctgcactccagcctgggcaacagagtgagacgctgcctcactgctcccccaccaaaaaaaaaaaaaacaaaaaacaaaaaacaaaaaaaaactgttttaaatgcatgatgaaagttaaagggagagtcaaccattgtttgattagtacagcccaaagaatttggccatttacaaacagtgccttgtctcgtagtgtcatttacctatattattcatataccaccagcacctcaaaagtaattagagtatctaaaataatatactagtgataggaaataaatgtaaaaatcctcattgaagggaccttattagatgctaattattgcttggagcctaaatcaaaaggcctgatgtttcttgtgcctcagtgaggatgagaaatccaggggctttgggttccaatcctgttgctatgcccctagccctactgtcttaattattcctgctgtcctctgatttcctcctctctaagggaagtcacagtatcatttgagacatttaagaagaagagtatagctgtgctaactaatgaagattaattctgttgcatctatgggagaacattttttttttttttcagaaaatgaaagttcttttcaaatgtttagtttcccatcttattctttctgttcctcacattaccatacgtttcctcttgtgttcaggaaaaactacatacatgtaaaagcaacaattaagtatgaagatgctggccaaagtgatccttaaacatttccatttattcgtcatcatcctttaattttattttccttcatgctcaatccaagtggatttgcttgaaacaaactacagttttccaagtcacacctaccacccagcagctttgggataaaaatgtaatgtagtctattttactttgaaaggattcctttatttactttgaaaggattcctttttcaagaaatagctttggagaaaacaaacaaagaaaataaccaaaataaactgtccctaactccttttccttgagtattgaattttctgaaggaaaccctccctgaagaatgtttatatatatatatatcatgaagtctaaacactcttcatgctgtgtagattcttaacggagcacatttgtttgaacctatgcccaacgttaacactacttgatatctggctacaaaaatacccatcagctgtgtcgtctccctgtagccccttgaaaagggagaagcaagaatttgttttcttgaggcattctcaaagaccgcatacccaggctttgttgctgggattctacctctttctcctggtctttgctcttccctggacaccagatccagatccagatccaggtccaggagggaccaggaaatcaggagggtcatcctggcatctgcccatttgtagctgatcagagccttcatggcagccatggaaatcatcgtgaaactgtattcacaaccccgtgccttctcgctgagctttctctgctgcccaaggggttacctgtgtgaggcctaattacatctggacaggcaggcggcagagacaacccagggcctttgtcctttttgtcagtgtgagtcagtaggctaccatggagtctcccgggaagggggtgggtgttggggggcaaaagcctgatttttgtgttcaaaaaaaaaaatgtttttgcagctgacagctgtatgcaaacagtaacagtacattacaatgaacaccttaaaatatgaggaatcaagactgttgactttgggtgaaaagcgagtgattcaggaccaagtgattgagtagctccgatcaggtctggttttatctcttcctgataacacagcattggttgttacagggacaaaagcaggagtgatgtatttggctaaatctttaatcaataaaatagattaaggatcatgaatatggagttttcttttccccttaggatactttacttatactgtgctacaatttagtcccaaagcactttcagtgaattaggaaaagctgtcacttccttaatcttgtaccggcgaacagctaggtcagcgaggtacaggctggacacttttgtgcagggtacatccaagccaactgtacgtggcatgctgctgaagttttcatcttcgcgtctttcttccctgttggtctctttgtacctcttttctgcttttgtcttattgatgaactgtataataccaatcaagagtgcatggaaatatactattacttacagtagaaacagtcagtgagggaaccaactactcagtctcaaaatgcgctctcagaatatctggaatgtttcccacagaattggtgatgtgtagaaacaggctgtctttgatctggtaaagcaaatccattttcagaagctacaatctgataaatatcattcatcctccatttctctcctggagtgatgttttcctttcttacggaaaacacatagccatagcttacttgtatcagcatcgtacgatactagaaccactacgcgaaagcagtgtcagtggcaccactggagttaactgtaattcaaaggagcaaaagcattacgtatgaggctttcccatcctgacttctagaattctagctttccagtggacctcttgcaaggaatctgaaatagagaaagaaacaaaaatatgtagtataatttcaccagagtttttcctcaaccttaataaggcttaaaaggcctttccctccactgctgtgtttgggagtggaggagagttcctattaaatgaaaacactgatcattctctgtgtgcataagctgcacccacataacactaatggttagcacctttaactcttgcactctgggatgtaggacagatcctcaccaggcatcctctgtcttttctgtttctgactgcagacgatagcatttctatttagtttagaaagcagcaggtgctgtgtgcataagacttccaggctgcacaagaaagcaagcaggttattgcagccacaataggatgtaagaggaggtgcaccctccctttctgctgaaaggcagaaatggaggaggggaagtgtctgttgtatgttccttggtaattcgtgctgcagagttggactgctccctcttagcttgaagacactcatgtcccctgaggctcacgggaatggtcagtgaggccacaagaaatgttttgaagcccaggcggagacttcagattcctttgcatgtagaagtgttggccaaaaatagcaaataccagtcctttccgaagcctctcccactctctgggatgcagacagtacaggcaagcatcactaggtggcacagctgtcctggtgtcttactctcatggagccacacttaaaactgctgtgggatgctttgatgaaatacccgataggattcctgtccagaaggtgccaatacagagcattcaggtcaagtggaggattcttttcgcaggggatcactggattgactctaggagaaagagaagctatgcatgccgcaaacacctgcacaccaccattcatcctgcccaggctgctgctgagtggagctcaggcttgcaagtttgtggatcagtgtgccccacaaagcgtgcttatctctgcctcaccccctagggggagtggggataggggtagtggaaagtaggtagccagcccctactttctgctgttcccactccaaaatgtacatatttgtcaaaaccttccagattccttctgagtggaggatgtggcagtatcaccttctgtctaccctgagtgcctcactcccctcttccttctgccatccttccacaccctgctcagatgcagccttctgaagatcagtccagcccacgataccctccctgccacctgaggtgccatagcattacgttgtgtggttgttgagtcagcaaacatgggctgtgtgtcagagcctagagagcactaccctctccactacttctgtcacctctggggaaatgcagaggatatatgctgcccctaagcagcagccactataacgtggtggttagctgaccaacagacttgttttggctcttgttcaccacctactaggtatgtgctttattttaataagttagtcaacctaagacttggtttcctcacccataaactgggataataatagtacctattcattatgataagaattaaagagcaatccttcatggaaagcaactgggatggtgcctggcacatagtaagtgctcaataaagcaggtcttactcttatcgcaggagaaggtatcacagccaagaccaacccctgactcttgtgactctgcgccctgtgtatgttttactcttacacatgcttgcattctttctactatgccatattgcctcctcttagtgtttagaacatctcttgccccccagttgtttgtgccttgagttctctttttcacaaactagcttgggagctccctgaagacagagaccatatagaattacacagtgtccttctactttattgtcacgatgctttaagagagttattgactgtaattattaaattctaaccatggaaaacttctcaatgttgactttaaaaattgtttgaaattttttagaattattgatatcatgagtgaagtaggttcccaaactatatttcagaggacaaagtttgtacacgttttccgtaaagggccaaagagtaaatattttagactttgtgagccacgggtgcgtgtctcatgactcatcgctgcggctgcagtgtgaaagcagccatggacggcatgtacacaaatgaggttggctgtgggcagtgaaaatttacgaaaacaagcagtggccagatcagaccacatgggcagtagttttctgacccctgctctaggaggtgataaaaagtgttcagggaaatgggttctgtggtcatatcaaacgtgttggctatatattgatttgagtcatctcactgcacagcactcattaccatattaaaagcctctgagaagtcctgcagttaagaagtacttgggccgagtgccgtggctcacacctgtaatcccagcactttgggaggctgaggcaggcagatcactaggtcaggagttcgagaccattctggctaacacagtgaaacctcgtttctactaaaaatatgaaaaattagccgggtgtggtggtgtgcgcctataatcccagcgactcaggaggctgaggcaggagaatcacttgaacccgggaggcggaggttgcagtgagctgagatcatgccattgcactccagcctaggcgacagagggagactccatctcagaaagaaaaaaagaaaaaagaaagaaagaagtacctgtagctttgtctgacctatagtttccccacttccgtaagtgtggaatatattgtccatagcctatcagtgcgttaacatcctgcagactggtactcctcatgctaccagttagaaatgctggatttttttatgttgactcacaaaagtccacctactgtattttttatggtagcatctttgcatttatagtattattattttcgtttgaggacatggacttgtatgatcactgaattctgcaactttgtgtttgtccaccgaaagaatttggcacctcatcagaaacgagcctcatgcattaaatccaaatgggaggatgttagacggggggatatcaccatgctcatctctgtgctgagctccaacgtaagtgggagttctgagaagccgtgtggtttaatacatctgtctccttggctgctgtgccagcttttcatgacagtgcttttcatcatctgaaacatgtaattgcttttgacgacaacaagagaattgtggcaggagaactctccgcagtttccgaaaacactgagcctccagcatttcaggtccagtcaacttcagcagatgtggtgttgggacacgagggtgttcagatgtgtgggggtgtccaagggggaatgattcagagccactgcctcagtttttaaagtaaggattcgtggatagtctttgtccccagtacaaaggcatagcggaaaaccaaagtggaagatggtgtggaggaagaggttcaaaggtgattttgttttttgcatcaggatgatccttgactgtgtctgaggccaaaagtaagtcttgactcccatgaaactccaggaaatggccggcacttgaagagccgtaaagaagcagcccagacctcactctcctgccagcccctacttaaaaccaccccttaggcttcccacacagatgagaattgttcagggggactctatgggtcctgttggactcgacgtcaaagtgtcctgagtcctgagcttatgacatttctacaactgcacacagcagcagatagtccctgtcaggcagaataatcggaaacaggctggcttctccgccatgacgctcaccgggctttcagggcaggggctgtcacgaagatatctggggtgtggggcaaaaggaaaaacagttcccccgggacaggagtcttgtcctctctgccgtgtgactcttgacagagggcagagaccctgcatctggagtgtgcctgtgcctctctcacctccatggtcttgctgagccgctaatgcctcagaaggcctggctcactggaaagatgaaaccaggacacagtgttcaggtctcgtttcctgggataaagtgggtactcaggtaagcagaactggataacctaggaacaagttatcaaaggcttacgcatgagaacaggccaagcagacctgcatataatttcatcagtaacaccagcataatcttacttaaagtattgttgatattatttagtttcaaatagaatttaaagggaagaagtatgaaggatagtgacttaaagtacacagaaactgttgtacagttttgaacacccaggttacacactttattcaaatgctggtagcctcttttaggtgtgtgttttcttttccaaagccatatctaaatgcttacttacataaacacgtgagtcacctctgcattctggggagttttaacgttgctcatttttgccacaataggaagaagtgtcttggtttggatggttctgtcgtggaaaatgggtccgcaagaaatgcttgttgaatgaatgatgatatctcccttttaatagctgggaaaaccaaggcaaaaagtcatggccggaggaccacacttcacttcctctgcttctctttctgggtctattgcatatataaataatttgggggcaataaaggattggaattttatgtgtactatcagatgccaaaaaaggggaaaaatgttaaacagtcattttaaaaatggaacaataccgcaaaatgagtgatgcttcagatttttcattgaattttgtttttgtttttgtttttgttttaccattctcgacacctttatcctgatttatgtctcaagaacaagggaagagacactccaaggagaagttccatttgcccttttaagaaggtagagaacacattgaggctgtaattaccaagccctctagaggcacttctatggtgttaatgcattttatgccctcccacttgcaaaaacccaagtcctgttgctttcctcttcaggaaaaatgtgagtatagaatgagaaaactggtcttccttttgaaatcgtttgagagtaagggaacacaaatcagtcccctggtcagtctgtcttatttcctaatcctgtgtggcaagggcttctgcagggggcccaggccatgtgccaggtgacctgaagagagctagtgcaaatccctggatgctgggcataaggacggtcagaacccactcatccatggcatcaaagaaggccctctgtggttttgaaggccgctcagcatgccagagacccagaccccttctagaataaaaagagagaatccttataggtttcacaccagaggtggctgtggaacggctggttgccccagtcaaggtaagaaatgaaggactaggtagagctgcctcagcggttgagaactccgaggcagccatttcgagcaaaagatgctctccaagaagggccttgagcttgcaaatatcaattccactttgacaaagtatgctgtttggcaggaggctggctctgaatacctccaagagtcctcgtttttcatcagagcagcctcgaagtcaaaagaaccttacttcaggttgacaccagaggaggctgtttcttccctctctgttgaaggctgttttttccctctctgttgaaggcctgttggcatctgttatcaattctagctccctttcctcagttcagtcctggatcctgctgtgtaatattccacccagtccagctggggtttgttgatttgcttaaaaaatattaagcaacatttgtcagaggcaccttgctgcttggtatagggacctggggatcaccctgcatttgcatgaacatctctgcagtacccttcctgcggctcgcctctggctcactcaggtggatctctaagctgctccagcatggtggcagcaggatgattgcgacactcagttccatgtgcccacgaccaccttcccctttgtgagaggcttattggctaatagaaacctgctggctgtctccccaccacctctcctggcggagactattccctaggacaattatcaaagctgagaaagagctgaccatgttttgccagaatggggtgaaggaagttgagtttgcacaagggccatcctgtgtgtacagtgccctccagccagacgtagattcctctttttcctcatgctaattaaaagggaaatttatttaagacataccttcatatttctctccactacctcccctgccctcctttccctctcccatgcacacatgtagcttctggtggaacttctgagacctaactgcttcctctcacttcctccccttttctccgttgatctatcctgtccccggatttctcagtccttgctttcttttctctctgctccccaccgaccttccagccctctcttgttctggtctgaggttgttgcagtgggggttgcagatgtctgggggagactgccaggagacagagacaatagttgtgcctgttgttctctgcatgccacgaagtccttttcccttagcatttgcttctgatttaagggggaaaaatatggctttatgtgtttttatagctaaagtgatcagacattccgtttgtgttgagattttaggtctagaaaggaatggaatggggagtagggatgtaggccagtcccttgtcagatttttgatttgctggacactgcagtatgccttgaggcccagcctctccctgactcctggccagggcctgccctcattctctgcactgtctgacctgttctagggtcttcttctcccctctatacctggtacaccccttggatgatctgggcaccttgtgatcccagcacaagcagtgctatgcagcttgggtgcctcagagtactcaccttccccaccttctgtccttgtctcagcctttttacttcagcgcagcaattgaaagatgctgccccatactccccagcttctcagtcattaaagtgcttaacattcagccggaggtctgtttataacccaggtattcccgagactgagtgctgtataaaggaaagaggtttaattgactcacagttccacatggctggggaggactcacaaccatggcggaaggtgaatgaggagcaaagtcacatcttacatggcggcaggcaagcatatgcaggggaactcccctttagaaaaccatcagatctggtgagacttattcactatcatgagaacagcatgggaaagacccacccccatgattcaattacctcccacctggtccctccctggacatgtgggaattatgggagctacaattcaagatgagatgtgggtggagacacagccaaaccgtatcagctactaaaatgaaaggtgattaatctgatgagtatatcaatattaactgagctaaggagaaagccagggacagcccttcacattttcccgagtgcccccaagtacagcagcttcctagacataactcatttattcattcaacaaatatttctcaagtgcctcttgtgtgccaagtaatgttttagaccccagggcagtgcttcacagactttaatgtgcatgcagattacctggggatctctgaaaatgcagattatgattcagtaggtctgggatggggcctgagattctgtatttctagcaggctcctggttgatacacatgctgctgggaaatggagcaatcatacctgatgagtgtctagaacagtgctgtccagtggaaatatagcgtatatatgataagcacagacacagtgttaaatatttgtgtgaccatgttttttaagaattgaaaagaaaaaggtggaattaattttggagatacattttttaactcaatatatccaaaatagtacaattttaatgtgtaattcatgtaaaaaaattgagatatttttattcacttccaactcaggtgtggattttgcactgacagcacatttcagttgggactggccaggttcaagtgctcggtggccacaggtggctggtagccactgtattagcacaggtccagataatgtcctcatcacagggcgactcggcagagtgactctgagaggagcggaaggtgacatcaaggtgtctctgagaggagcagaaggtgataccaagggcctggcatttgggttacagggccacgtggcctcctcacttgaggagcagtctgaaaggcatgaatcttagaccagcgaacttcccatccccttgaggaaaaatgaaataaaaacctcaggacacaagcacagtctcttcctagcagaggaagctaattgctttggggtaggccagatttcctttccttcccaagtgttatgcccatcctgcttcattaaaatggaatctctttaaaccctacaggtgagttagggagggggtgggaggagcctggggtccgtgtttgtggctctttttaggtttgtttctgatgtccaatcctttgagcacagctttgctctgggaaccaaatcctgacttgtgcattactgcaaattctcttgaagtttcagactgcttgggataatctggacacaagagcaggctacacagtgcttaagagtcaccacctgtcgtaccagccaaacaaagcaaagggaccaggttagaggagttggggacattaaaaaaaaataaaaccctttgcttccttgcctcctgccttcttctatagtccctagcccctgcactctgtgcttttataagtatattagaaggtactttatctttactggcagtgtattgggatgtggcaaatgtacctgccgtgggagggaactgtatgacaggcataaacccaggccacagtgcatttctatggttaggtggaattagctccaatgtctgatgtccaattagctctgatgtccaggtatttaaaaattactctattagagtaatacattctgaaatagcgtttaagggctggtctagtgacagtagaaaacatttatgtagcacttcttggttatgtttttaaccttctctcatttcatttttacaaagttcttgacaggtaagtattttctggaggaggcaaaaggactgaactggagttctcatctgtgagatgaggagttgggaggcatggatctctccagtccaatttgtcctgtactctgtcatctgtggttgacttgtgcatttgaatgtccaggccctgtgggttagagtgttagctctgaggttaagttacctagattggacgtggggcagaatgtttgccctctgtaaatatctgtttttccatctctaaaatgggaatgataattgcacccaccacctagggctgagatagcattagatgagatcatctgtgtaaaacgctttttaagttcttagaagtcttcccatcaccatcatcgccattgtcatcgccatgtccatcactctcagcctgctgtctgtgtctgactgcagttataaacaatgtgagcaggatgaaggatatgcataaacttgcccttgctcagtttctctgctatccacataccccagtgcactctttgatgcattgctttagaaggggagagtctgggtgtctttgctactgtttctatttccgtaagaaaaatggcccatgaagaaacttaaaaactgcaagtttgaatttctccaggcaggcaaaaatgaggtaaataaagtaaaggacttggctggcaattcccaaagaagcaggctatggagggacgaggtcccgagtaggtaggaaggcttatcgagagaagctgctggttcatgcactggcatcatccgctattgagttatcttgtgtccgctcagccagctaagcacaaattaatctctcatggctgaccaattacgtacagtcttttgtgagaaaacaagttaaaagaaatgcattaggtaaagaaagggctagcagctcttgaggtgggaggagggtgggctcacacagtgttagaaagcatttaactacacatccgtactccagcgggtagtatcagaatgtgtctgaaagtaacgatatctaattgtgtgtttgtgtgtttgtgtgtatgtgtgtgtgtgtgtatttattcattaggactagggtgaccaggcacccttgccatcttggaacagttccaggttaccactgttgtccctggataattattgatagcaccttctttcatggtttggacaataaattatatggtcaccttaattaagaccacatagcctatctgtatatataacaaatacacatgatttgtcatgcttggaaaagtctaataggctattgttgaggtatgccttttttgttttctctagaaacataaaatcaaagttgtattccggaaaggatttagcctttggaaaaaggccaacctagacgctattgtagagaatggctgagtgtggtagttaagagacgagggtctgatgctgatcacgcaggttccagccccagctctgctatgtatcagctgtgactccttgggcaagttatttaacctctctgtgtttgttctgtgacctctgaaaagggcatagaggtacctacctcataagattaaaaggaggattcaatgaattaatagttaacacacatgaaactgactgacgttaagtccttagtaaatatttgctattactttagtcccagctttattgttcattagctgttggggcatggggatgaacctctctgagccctatttccctcatctataaaatgaacatactagctgggcatggtggctcgcgcctgtaattccagcactttgggaatgtgaggcaggaagatcccttaagcccaggagttcgaggctgcagtgagctatgattgtgccagtgcactccagcctggatgacaaagtgagagctgtctctaaaataaataaagtaaataaatgaataaaataaaatgaaccaatgaatttccaccccctggaaatataataagcttcaaatgagataaaatatgaagagtttagtgtggcgcctggttgtcaatggatgctcgacaaatgttaatttctcctccttttcttactgccttccttcctgctttcctccttttttctaataggatggaaagcacctctgatagctcattgaattcatctctcctccagtttgcttgtttcatggaagatttaaagttgttttctgtgacgtcactggcatgaggctgtgaaacctaccagtgagataagttaagcttcctaagggttacctctgtcatctgcatgatgcagaaagactgtgagcctgggatgtgtgtagtgatgacaggcaaagagagttttaaaagttgtcttaatttttacaggcttctggaggatctgttgctgattgcactggtgagttttgggttttttttccatctccccattcctgactgtctcccctatggttcacccaatgtctatgagttattttagcttccagtaatatttccatttcagtcaaaacaacaatgaaataagcctggcaaagaaaaatctatatgatagctggttttacaaaggaaggcataattacaaaatactatagttgcttttggtttctgtggggtcaacaacacctaaccaagagttttatcaataaaaacaacctttgaaaaaatgagtgattattgattatgactataaagtatagatcttttgaagtatctgcattcattcagcctccagatggatgagtttttacttgtctgtaatccatccatccatcctttcattcattttatttattcgatgaatatttttaagtgctttgtgccaggtactgtgacacgttcaggggatgaaatggcaaaaaaagaactgtatttgtcctcatagggtgtacggtctacctagtgtacacatcacatgcttgtcatcatttaaacacactccaagactcatcaaatgtcctgaaatgcatcagaaaaagaaaaaaaaataaagcccggaaggaaatggagggaaaagatcagtattacatgtagaaacaggcaaaaagctttatatcaatgttttgcgagaagataaaataggtatcgtgagctgaggtcaggcaagcagactagagaaatgaagcaagcatttcatgtgaaagcttccaaactgttctttttgcaattactagttttagctcaagcctgaacccatattcttgctttgctttttcacctcatttgccttagacaaattctgatgggatgtattagtgtcccatataccacctacctatttaagataaagcctacttacagctaatagaaagtggcactataatgtatatttcatatattttatatatatatatatatatatatatatatatatatatatatatatatatatcaaagcttgtgatcatagccattagaattatgttcttgtaatatgggtgatacacacaatttacgaagttggaatgtttggggaggaatgtaattggaaaactaccatcaacaaaatggcccaaattctttaccaaatagcattagttaaccaatgttttctaacactgattggcaaagaaagtgcatcagaattacctgggtcctttgttaaaaaggcagattcctgggcccagcctcacctgctgaatgaaaatgtctggaggtgggatctggggatttgcatttttaacagatttggtaagttcccatgcacattgaagtttgcaaactatcaagctggtccatctatttttttttttttttttttgagacagagtctcactctgtcgcccaggctggagtacagtggtgcaatcttggctcactgtaacgtccacctcccaggttcaagtgattcgcctgcctcagcttcctgagtagctgggattacaggtgtgcaccaccacacccagctaatttttgtattttcttagtagagacaggtttcaccatgttggtcaggctggtctcgaactcctgacctcgtgatctgcctgcctcgaactcatgacctcgtgatctgcctgcctcggcctcccaaccatctgttttaccaaggaagaatgtgaacctcagcctcagagaactgtctctgagaaatggacaaagcaataatgcagtaaaaagaaaaaagaaagaaaccagacacctttcagattcttcacaattcccaaatgccaacatttctaacatttgaggttgacaagagcccaactgtattttgccagatttttcccctcaaattttacctccctctcccaagcatttttagggaattcagtccatgtgttcttgatagtcctgcactaaacttatcgaaaatgtcattttgtaacagtgatttggttgccctgtagtgtttcaaaatcttttgttcctccttagaaaccagaagttgtacttggccaaggacgagctaaccccaaacagcaagaggtttgagttggctccaaagcacaagcctcacaaatatcccgtgagtctcccacaggcttggggctctctgtttagaattagaacctaatcttcaaatatccctttaccctcttgcctcaaaaaggaaggcagtgaagagcagcagcaaggcatcctggatgagcactggaaggggagaatgctcatgttttagtcgtgggctttccaccagttagctgtgcagctttgggcagatacttgaacttctctggtgctctgtttcttcatgtttaaatgagaggattaaactgtatgacttttgggtcgaaagtacgtctctgccatcagtatcataacaattattgaaattgctgcctagaatcttccgctaccacagtgtattttgattggactgtttattgccttagcaaacacaatgcagtgctgtgtctttggcatcttgccaggaaagatgagccaattttctcgtgttgcttctggatgtcaaaacattctcatctgaccatgccacagaagaagtttgttgagagtgtgactgactgacataatgactgattggctgataacggcagctgacagtgattgattgagtgtaaaattatctgttctcattacttctgaaattgaattcagattggttctattggagggtttccatggagaccataacctgctatagcaagtgtttgtggatgcaatgttttattgtgatcaatacctgtttcctctgctggtccaaagaaattattaatgattatagtcaagtagaaagaggcaaccatatataagaagaaaaaaactctcatattttgtctcattgctacataaaacaaatgtgggccttcccagacttgcgctttggctaactagttcataatacgttcgataacttgccattcttcttttgctattaatgcagagggtttgctttggaaaaaagaaaagtatttctaggactctttctctctttgaagaagatcagaataatagacgaatgttcatacttggtttttttttaaatgcgatgttacagaaacaacaaacatttaatcaaatcttaaacacacccatgttaatgcagagacagagatggtccctcaggctttttctgggttgtttccatgaatgataaagtcattaaacaatttcataggcttgccttattgatctctcacaatggcatgctatgtctgctcttcaggaaagcctttcctgactgcccccatcagagttaattactacttactctgtgttcgcatggccttcttccatcttctattatagcattcatctcaggccaccttgccttacaattacttgtatctctttttcccactagattatgacctccttgaggacagggtgattttcttgttgctctttgtattatcctcagcatctaggtgaatctctgatacatcacaagggttcaataaatgctcattgaattgaattaactggatctgcattccaaggtcatctcttcctagactggtgttgaatgggattcccatgaagtgaggcagcagagtgcgtgcttgctggttctgttgctttgtctcctgccctgtggctgcgtctgtgcccaagaggattgttaggatatattgtgctacaggagattgatattgtataggatgtctgtacagcttatagactggtgctgaccgtactgaaatgatggtgggaggatacctaataaggattctattttatgcttagctgtattcattcattggtttggttggaatctgcttcagcgtacttcctctacccaaatttggctcattagctgaaatcactttgggatgaatccactgttaatagtggctaacatttttcatgcacttacgacatgtctggcacagtactaagtactttacatatttttcaattcttacacattgctcccattatcccattttgaagataaggagactgaagcacagagtgtttatttcctaaggtcacacagctaggaagtagaggagctaggatttgaattcctatagtctagcttcctaccccattcttaagctatctaccctgttgccgcctgacaaaagtgtgtttcaaaatttaattcctgaactgactgcatcaaaatcccctgtagtgtttgttaaaagtgaagataccccaagacctactgattcaggttgttttcaccgaggccagcaaatctgcaccaacatgttttattctgttctgtacctcaagctttgatgctgctttgttttcttgttttgggagaagggcaggggtgggggtggaggcaagcgagtccaatactacaactttagaaatctctgctctagggtgaacactctctttgagacttctaaattaaagtcaagtcttttggatttttgtttctttgtactgcctaactttagaaagacctggaagcggtaacatgaaaacatttttagagagaattaccaggcatttttggtagaatgagtgtttaatggaacagtccagagaactcatcaaagatgtttattaaaacgcgcagacctgctccaattaagggcccagtcagtggtgttaacagtgaagggactgttccagaggcgtgctgcacgggacgcccaccccaaatacaaatggtttgccagtagctcacaaatgaaccccattgccttgcacttaagcttcctgaagcacatacatatcctgctttgtgctttccgccctatagtaaacgcaaaccaatggagatgtgaagcaatctaatagcaacaaggcaaacctctacttcctctaaagaggattgcatcctcttgctatctttgccgatgctctcctacagacccatccctgtcatgtctttcctgtctttctagtagaattctggctgctcccgtaggacctccttgcgggaattttccctggttgctgcctccaaggagaggctccccaccagaaagttttaagaggcttatgcttctggggttaatgcggtcctttctgtcaccttgttttctgttcctagttatctttcggtaacttttttcctaaactactctgaaaggcatagactgtctcttgaaagctcatctgttcttaacccctttccctcattccactgactgcagcatcttccacataccattccctcttagcatttatgtccatgtcatgcttttgttggtttatttgtgtattttctgcttcccaccattagatcatttgtagaattaatgaatgcctatgggttaatagatttttcgctgtatcctcttttctctgtatctctctgcccagttgcttagaaatgcttctgtttgtgtatttgtatccaccttctttggggagagttatgaccctggtccttatgccatcagtggtattgcaattttgtatgtagcatgaccatttttaaaaatgacatttcatagtgagtgattcagacacctatcattcagcttacctgccggggccctccaaaatgagcagaaggcctctgtctcattctagaagcttgaaggtctccacgtggtttgcccaggggcccacaacctccctgcagtccaggagtgctcccattaaccccagctgtgtgattcagaccagattcttaggactttttaagtgaaatgggacagaaaattgcttgatgtattttgccacatgaagtacattttgctgccgcttagttctttattgtcgttagattaaaaactctcctaacgttgtgtgggtaagtaaaaatctttttatttttatctggtatgttttgaaaaaaaggaaaaaagaaactagacattgtcaaaatatttgcttaatcttgcagatttgggaagttgtatagccactcgctctgacagaccagaacaatggtcattaaatgagaagcagatgtaataaagtatgcagtaaaagccttctattatgggctggaaggggaaaaaaatgagttgttaacagaacacagtaagcattatggaataaatcagaacaaaaccattcccaattactgtacaaagataattaaagtctacaatgctaattaaggtctgtttatatctatttctgtttgtgtacaaacatatgcgcatagttaaatattttccattgttttttatgtgatgctaacttcatagttgaatttttctgaatttaacttttgtttttatgttaccaggaagtacaatctccagaaaactgaaactccagcttttcctccttgatcgtagcttatttttcttggctaacttcagaaaattcttcaagtatgtaacactacttccttgagtggatttttttttttttttttttttttggtctgtgatgtttttagtggaatcaaccagggttcccagcccccactattaaaaagaaaaaagattttttttttccttgaacttgaccaacatgcacaattatagtcacacatcagagttacacaggattacaaaatgtcttttggatataaatctcaaataaattcaaacttgaagaaaaagaaattggtaaataatcctccctactggcagttccccagggttttcttcacagactataaatatcacataaatattccctgacctgtaagctataacttttggatggatgtcaatggttttttaacagggaataacaatgaactgtaattgtcgttcagaagtgatcagttaaacaattagaaaggcaacagctttcaactaagatccaggaatagcctctatatagactgactcaagcagtctgagaaacgtaagaaaatcactttgtgccaccaaataaatcaagaatgacatttttaaaagaaaatgctagatactccttttttccttctttcaaacccacctgcttcctctttttcccccttagtttcagtccatcaaggattttatatagctgcaatttcaacacatttcttccttctaggattaaactgaaacaaaaagagcctgtgtatgatacagaactttaacagtctttaaatagctttggcaagccttcattctagaccaggactgtccaattgaactataatggaagtggcatatgtaattttaaatttcctagtaactaccttaaaatgaataaaaataaataggtgaaattaagtttgataatgcagcttatttaacgtaacatatccaaaatattttggtttcaacatgtaaccaatataaaataatagttaataagatttttttttttgagacatggtctcactatgttgcccagctggtctcaaagttctgggctcaaggaatcttcccacctcaatctcccaagtagtcgggactataggcatgcaccaccatgcctggcttgttgataagatattttacatccctgttttcatactaaatctggaaaatctggtgtatgtatgcactttacagcacatctcaattcagactggccacatttcatatgtgcaaaagccatgtgggttggtggcgaccaaattggacaccatagcaagtaaataatacttgaataagaaccactattaagttaataaaatctgtaggcttgagtgtcttatttatatggagctactatctaggtcaatttggagataaagaatgaatcaccctctgtctctcacttggttggtgatggatttggagaaagaaaatggcaggaggtcttaacaaatttgaagggtcccactgagagcaaaactggtttttgttttttttttcagaataaagctataaatttggggctcttgagttttgcttgcaagtgaggactgaactggaagcattgttggggagaattagtcctctctgaacaatctgagaacagagggaacatttggactaaaggaaaactcagcagcactctcccctgattgcctgaggcagctcttgcctcatggaagacccgctttgcctctcctgtttgttttgtagccatagactggagcctaaatttgttccaagctcagtgatcaacatgcacaaactccttggggtatagccaagagagcgtggacttttataatctgatagcctttggtttgaacagctgggtgacttggagcaaattgcagatctgaatctgttccccgctctgtaaaacaggaaaggcaatgcctacctcgcagagttgtttgaggagtaagtatcataaagtatttaaagcacctggcaaagtgcctgacacatagtaggcagtcaataaattatagctattatcataatataaatgtatacgcatgtaatatttatatagacataggtaataagaaaggattccttattttattattgttccaaattgctgctgtggccttatgcagaaggatcccctgtactgctctttgacccataaatgaaaactagtttcctagtttatgatcttgtatgaagataattcttgctgaagccagggcaggaataggtagatgtctgggctgtgttagaaaactcttaagcatttgttagacttaactttggcctcttttcattgttttcaaaatgactttagttgtgaatgtaaaatgtttctaatatccacccttggtccaacctgggtgtgtgattacactccatatgattgtcatgtgaaaaggtgaagtgggcaattttggtctactccgttgatcaaatatagaagttcttgatttttacctcttagtggcttatagtttgaaaaccaacttttaattttttctcttctctaattcactttcaaggttgtgagtttagccaaatttcatatgactcagtctcatgcccagaagggcactatttgcaggattctacttgatttgtgtattgggggagatataccattcttcttcagttcaacacttctggctttaaattacatttgggtcacattttatagctttctaagggatctgtacaaatggtaaccacaactggtaaaatgtgatgtaagctacttggaagggttttctttggaatcctacgtaatttcaagtactctgcatgtaattttgctagccagtcaattaactgaagtgttcttcatgggtagagcatgtgctgaatttgacatacatgcttacgtgcaataagtccctttcacagtgtacttcccttgtgacacaaaaagacactattttgagacaaaccctatcaggtaatcagcgataaaatgaccatccttggcagattaggtaggaggaacatatatcttccaactcttcagaagagaagtaagtgataatgaaaacaaaattatgaacagttttacatagtacacatgaacttctatatatagtcttttgcataagaagagtctctaaccattcctgtggttcttctgtcatcctctccatttgcccatcgtcgtggaacaagtaatagcagatttatccttccacgtctttctctttgctaatacagatgtacatatgcatggatacacatttatagggagttcctctctttttggtgtggaaatagcatcataccatgcatatttttttccactgaacagtacatctggcatacctctaaaagtcagtagatatagttgtaacccttatcctcccccaaccaccaatttgccaagaagaactttaactacttcatacatgtatgtctagaacatacacacaaccacatagtacaaaacttcagcaacaatatcccaggaagttagttgcttgctgagctaagtcaagtcctggttcaaatatgcatctcaggaaaaccagaccaagagtgttaccacttggtatataatagaaaagaaataatgcaaataaataaactggaggcataatctcttttgagcattatagatcccagatgaagacgtgtgaaataaaggcatccttcacctagagatctgaaaagaaaataaatataaattacactttcataagtatcccattgtttcacaaaatttggtattcaaaaggaatttttctttatatcataattgagtttcagctagctaataatacttttggatttgatatttttatgccgttgtttctcttacccctttctactgctcaaatcttgtcaagagagtgacaatttgtaaataaattcagtttagttcagttaaacagttactgatgtcaactgttttggtcttgaagtacttgaataatgatattttaaataacctgggttttttaattaaaatgaaatatacatgtgtatgtgtgcatatgcatattttttatacacacatatacatatacataaactgactttcatagttttgtgagttttaaactatatttttctaatatccttcacaatcatttgcgtttttctcaaaattaatggggaagagatactataaagtatagcttatcttttattagaaataaacttgcttagtaagttggatatacacgcaaccttaaaaatctgttttagatgctacatttttttcagttctcgaatgtgcttaaaagtcacggcattgttttgttcataatcaccatcctgttatgggccccaaatatgcttggcaatcttctaattctctgattgactcattttctcacacaacatgacaactgttttaaatttcttctcaaacttcctgtgcttcaactcttccttctcaggacctgtgcaccatggattattccttctcttctaaaacccactctacctctcacatgggtcatgcccactggcttacagaaaagtaacaagactagtacagataaacttaattttcttctcaatcatctgagaataagttgccaacctcatgccccaatacctggaatactttagtgtgtaatccctgtatacaaggatattctcctgcatatacataatacaaccatcaatatcagcaaattagcactgatacattataaccttcaaatcctttgaccccgttcaagtttcacccattgtctcaatcaggtcctttatagccaaaggtactagttcagaatcacctattacatctagttgtcaggtctctttagtttcctttaatgtgaacacttccttagcgtttccttgacttccataaccttgacacagatgatgactctaggtcagttacttcatggaatgaccatcactttgggtttgtcttatgatgagattccaattatgcagtttcaggctatgaagtgtcagggctcctcagagctcagtctcaagccttcctgtcatctcactggggcaggatcatgcgtacttatgcctccacttgtctctctttaggtgagccacagatccccatctcaagcccaggcctctccagtgagctctggaatcattgcacccactgtcttcctcgtggccctttttggataccaaaggctttgatctccatgtctaaaaccagactcattgtctccctctgacatcttgggcctcttacagtgtcctgtctcccatgggtgccaccactatccatcttgttataaaacatgaaaacaagaattctttccccttctttaccctcagatccagtctgtcaccctgtcctgttgatttaacatcttacacatctttctaatctcttcacttcggcccatccatgctacctccacctttgccttggacttttgcagcctctcaactggcctacacataagctttccaactccctcccgtctgtactccttactttagccagaatgatcttttcacaatgtaaattccattgtgtcctttcctcttccctccacctctttcctgcttaaagccctccagtgccacccattgcatttaggataaacagaacatcaacatggctggcagggccctgtgtggatttgctcctgcttccctcctcagtctcatctcaggcctgatcctccctggccttttttttctgtctttccaatggtgctcgtcatgtgtcctccaaccacacacaggagctttgctcctcagcttgtcatttccctaggcttgcagtattttcacatagatttattgggatataattcacagaccatctggttcgggttggtgtttagatgtttttttttttaattcacagacctcacaattcacccatctagagtgtataattcagtgtttttaatatattcacagaggtgtgcaaccatcaccactatcttacttcagaccatcagtactatcttatttcagaatatattcatcaccccaaaaagaaacctgtatcctctagcactcactccccatcatacccactagcagtcactcttcagccaccaccaccctcaccaccaccatccctcctgttctggacaatttatgtaagtagaatcatacaatactgtggcatctttcccttaacataatgtttttgagtttcctctgcattttagcgtgaatcagtacttcatttctttttatgatggaatatatttcattgtatggacagactatattttatttgcccacgcatcagttgatagacatttgggccagcctttaaatattgaattcagcatcacttcctcagtgaactttcctgacctgcatgactaggccagatcctgctagatagggttactgcactgtgtctgtcaccttgctagcatttgtcatggttgcaattctacttttgtttgcttgattcttggcctaatttaatgctggtcttttctaacagactgtaaactagagggggcaggtactgtatctgctttgactcaccatgatattctaacacctaacaaagggccccgcacatagtaggagctcattagatacttgttgaatgaatgaatcctaatttagttcattaaaaccagattgtttctggcagtctacttatctagaccgtttgtatgaatttccttggcatagtctctattgtgctggagataggaagggccctccataaaccactcaactcctcctcatgcccccagcatgcctttacccgtttgtgtatttattaatagaattcagcatttattttatatatttattggaattaagttgcaaaaatgtagaagtaaccatgatgggcaaaagcagagcaggtcctgatgtgaatacattgtgagccagaagcagagctgtcaaaatccaggttactgtcagatgtgaagaggaatgggattcccagggcaagcttttgtcagtatttggggaaaaaaaatatttttgagcaaactttctcttaggaaataatttatggtagaaatatttttgcttgaacaagtggttagctataatggcagtagctacccttcgtggaacacttactgtgggttaggtactcacagtgctatgggctttaggtttgtaaggtcatttatttctcctagccaccttgggagatagacattgcctgttaccattttgcagattggtaaactgagactttgagagaaaatgtaatttggcctttatcccatagtttttctaacttcaaatcacatgttaaccaccatagttttaggtactatctatccattttggcagatctaggatctcctattaattgcaagatttaaagtagagaattaaagaagaaagttagagatgatgcctgagtaaaagcatacttgttgtaacagagcagaggacgtggcccaagcttgggagctggatagatctggatcccaccatttattagttgagcatgttatttactttccctgagtcccagtttcctaattttaaagatggggataattcagtcaatctcagtagtatagttatggatcaaatgacacaaaataaacaaaacgccgagccaaagtctgacacaaagtagatgctaaaaacagaataagccacctctgccctttcatttcttctacttcttctgtgttaatgggcaaatgaatggctccaatagaaaggtatggctagccctcccagttaatacgttttcaggccaagactaaaatgaaattgggactaaaatgttaaaatgtttactagaaatataaacttgcattcgcaccttaaatagtcctctcttcatttcagtgaatatcaattcaactaatactattggcgcatgcaaatgaatatgatagtaatggaccctcgcccacactgggctcatattccattagaagagacataaacaaacaggcttttataattcaaccaaatacagctcagttacaatgataaatgctgttgaagctgcatggtgaaattcaacagctttttttttttttgcaggccaggaggctttctaagcttactcctgatgcagttaaaactcaaaggtttctggaagccaatgaaaatcctcacctctgactgaaatggaatttcaagggaaagaaaatacaacgtattttatgaggtcaggtctcccataaggtgttaaaggcattgttcagaggtgccacctagcaacttctcccagaacaaaagattagccataggtacttcttgtgtctggtttttgagtttaaaataggaacaggcaaaggatgcatttggcagcatccttcatctattcctgtttaaacttctatcaataaaagtttagttctattaataaacatgtctcttgactttgttgtgaaatagaattggtgaaggcacaaagtggcttattttactacttatgaggcaggcgtattatatatgacatagaccaactggaattatggatggtatttcataaaatagtgtcaaagattgcaggccagggagacagaaagaagtatacttgattttcttgagagtcactttgcacttaaatacccaaataccgaaagtttaaacacattttcatgattcctttgtataaaaagtgaacagaatggctaccgttgtaattttgctgcttctagcaattcaccagcaaaatacatcccaaaatagcagatatacaatgcagcatatgctttggtgaatctaataatttcgtgaactcgttcgctgttgggctggtaatctacatagctttaacggtgaactttataaaattcggagcctcatgcatcagaaggtaaaaaacaaaagtggacagttttaacaacgatggatgagttgctagggaataaaattaaatggttgataataattgtggtagctcacgaagactgatgttatttacaaaagctccattttgcatgtaatcagatgtctattcccatgagctgggtcataattcatattccactttaatgttcatggaaaatgtgcttctctctgtgtacgtattatttttaggatgttatgtttccttggtgcatacacaatgagcctgaaatcctttaggaatgtgtttaatttgaaagttttatcctctgggcctggttaattcaaatacatggctaggaacattattgtaggccctgaaagaatgtaggcatggcaaattatgtgcataaaggcaactccaacccatgttgccaacgctcatttggtaaaaggtagtgaggaggattattttttccttccaaacttttttcttcatccactcatttaatttttctgcactaattctttacgttaataagcttgatttacactggaccagatttcttctacttttaaactcagaaccgtgtctggtggctcttttgtattaaaatcatcagcccagggagcttttacgaacttatgtcctcagtccacaaggtgtcctgtgttcacccttatattctcttctatccttagtcacaaagactgtctgagtcgcattttcatctctagaaactggaagaagttctaagagtgtgaggtaatgactcaaggacaacagctcccagaaaataacagggtttgccctgctgctttggaggaggttctcctgaatcatgtcactgaagcacagctagggcccgggacctgggaccacagcccttgaagggaatgagcggctgtctgggggctgaaagttctctcaggagaggcgttttcacaaggctttgtgataccgagcctcaggcgtggacagagacgtgttttaggatttgagaagcctgtggagaaattaagtcatgtcccagtgtacagtgctatgccataagaatggctagaactttcaggggcatcctggagcttgaccctggctcatcattttatacatgaaggggctttgggtcacggaggcatgggtttgcgtcctgtctgtttgattcattagatatgtgatctgggcctaaaacttcggagatcttaaacaccgaaaaccttggggcacttttgccttgctcccaaccatgaaatacaaaaaccaaagcaaaacaaacaaaaagtaagccagaagatataaaattgcttataggtctgttgtctaacatcaagtgcggaaaggggtctaacaaatttccagctgggtgcggtggctcacacctttaatcccagcactttgggaggctgaggcaggcagattgcttgagctcaagagctcaggaccagcctgggcaacattgggagactcccatctctataaaaaatacaaaatgtagccaggaccaggtgcagtggctcatgcctgtaatcccagcactttggaggctgaggtgggcaggtcatgtgatgtcaggagttcaagaccagcctgaccaacacggtgaaaccctgtctccacaaaaaatacaaaaattagctgggcgtggtggtgcatgcctgtggtcccagctactcgggaggctgaggcaggagaatcacttgaactcaggaggtggaggttacaatgaaccaagatcatgccactgccccctccagcctgggtgacagagggagactccatctcaaaaaaaaaaaaaaacattaccgggcatggtagcttgcacctgcagtcccagctacttgggagactgaggtgagaggatcacctgagtgtaggaggtgaaagcctcaccgaactatgactgaaccactgcactccagcgtgggcacttggcaccagagcaagattctgtctcaaaaaaaaaaaaaaaaaaaaaaaagagatccaagaaagttctgctttttcctaggatgaatgctacttgtataatttttttaaataccaactgatttccaccccagtttgacttgttcccctgttatgctggtgtccttagggtagattttgtggagaaacccagcagactgaattactacctctctctcttggtgttgtgcatattaaataaacagaagtatgccgtggcctttatagagggttggacttgtaatcaactcccaacactcgttcatgcattttttgtttccatagactcttaatgggtccccagggcagtaactggacatgccaaattggggttgatcaaagtaagtaggagaataccatggttttatatatcagtgtatacaaattggatacttctgcttattcttgagttagtgggagttatctactgatgaagacagtgtgataaggtctctcatcccatgtgaaatgatgaaaaggaagaagttgggattgagattacaatgaataaaggtgcatctttcatagctagttcatttgtttcagtgtccactcacatgagaggaaacccaaatatgcttagacaaaaatatccaaagctgttacctggaacactgcagcaacaccagcaacaggtttgctgtcttaaaggtttctaactgatcttgagattgtcccacctttccataaccctgcaaaagctgagtggtatagtttggctctgtgtccctacccaaatctcatctggaactgtactcccataattctcacgtgttgtgggagggacccagtaggaaataatttgaatcatgggggtggtttcccccataccattgccatggtagtgaataagtctcatgagatctgatgggtttatcaggactttctgctttggcatcttcctcatttttctcttactctcactgtgtaagaagtgtcttttgcctcctgccatgattctgaggcctcccagccatgtggaactgtaagtccaattaaacctctttttttccccagtctcaggtatgtctttatcaggagtgtgaaaatggactaatacaagttttgtcagttttttttttttttttttttttttgaggcagagtctcactctgttgcccaggctggagtgcagtggcaggatcttagctcactgcaacctctgcctcctgggttcaagcgattctcctgcctcagcctcccgagtagctgggattacaggtgcccgccaccacgcccagctaattttttttgtatttttagtagagacggggtttcaccttgttggccaggctggtcatgaactcttgaccgcaagtgatctgcccaccttggcctctcaaattgctgggattgcaggtgtgggccaccgtgcccggcctgtcagttcttaaacattgattaccactagggatactgctgcctccctgcatctcttacctgaggagccaaagacaagatgcaaacctgcatttatgttcaacctaccattttcttctacctccagacagcaaaaccacaaacgtgttttagaatagaattaaccagttaactctcagttaaccattttacttaaatctgtacactctttgccacaatgtgtctagggggtcacatttttacccacttttgaaataagaaagcacaaaagtacagaaaggagtcttatttatcacggcggggctctgaatatgaccccatcccagtccatagcagattttgcatcaacagaatgtgtgtctgtgtgtgcaccattgaaaatactggcatgaaaacaaagatggcactctgaactttgagctctgttcttaaaagcattgggaaaaagatggtgcctataaggtcaagcccagcagccacacacacaatccaaacttatcttcctgcggtaccttagcatgtgacacaattgccgtgccccgttctactcatatacattttttcccacaaattaatgaacatgtttgtattaattaatagctgcctaaatttgaagtctttctttgtcaagcattttacatgcaattagctcactcagtggtcccaaacaccctgtagggaaatttattttgttatcatgattttatagacaggagaactcagtcaacatagtcgtgaagtaaaatgtcccaaatcatagagcctgcaaatggttgacctagcatttgaattcaggcaaaatctgatttagagccttcacctttcccactctttacagatgccaccctgtagtcccttgtgtaagtacatcctgtcagcctttcaaggctcccttgggtcagcacatagctatttgaccaagggcacttattctgagcagagcaccatatgaagcccatccaggtgatataccattcatgtatagtgcccgccctcaaaatcccagtgcaccagtaagaagaaattggatgtgtacacaagcactctcctggaggctagaaccgcaggtaggatgttcatacatccctgtttgcataggacagtgtgttttcctgttgtaattattgatagtgcttccgtgcatctcagacatgccctactttggattatatcattgccctcaccataggagaagtacatcagaggattttaaggaagagaattgtgcatctggtccggggattgcaggcaagatcctcttcatggagaagatttatgcttaagctgttccttgagaggcagtgttgttctgtggctaggagtgtgggatccagggtcaggttccctgtgtttgaaccttgatcagcctcaatgtcctcacttgtacgattgctagaataatcctcttgcctcagagttattgtaaatattaagaactaatactcataaagcatttgaagcactgcctggcctatagcaagcacttactgaatgttagctataatcacttaaacagacacaggtttggaaaaggacaattctaagtttaggcagtgatactgacggtgtatttagggttttctaataattggttactcatagtcattcacggagcctctgcctttctagtctcccactatagaggctgaaacatcgcagtcacttttccagcctcccctgtagccatgtgacccatttatggccaatagactagagagggggcgttgaggaggacctctctttgcaggcctctcccgtccccagcgttggaacacaggtgtgaacttggtgcttgccgcagctgctactgtcatctccccaccttgaggggaggaccaagagagttaccaactgtggcccggatccctgaccttgtacaaccagtgaagcaaagcacaaagccatctgcccccagaattcacgttatgtggaaaaaagtaaatgcttagttgtttaggccactgtcagttgagtttctgatacaattgaattcatcataactgagaggcagcaataaatagcctaattcagcacaaaggtctgttaccatttgggaaggagaaaagatagatgaggggcctaaaatgtcctcaggaaattatacggggcccttgaagttttgtcagtttgggaataatgtgatttgagttatgctttaggaagggaattccagcttcaagttcaatgatggattagagcagagactacaaaatctaatagtgcaccaagattgcctgggatacttttcaaaataaagatgtgaagggccttttgttgatattctttgatcagtctctctgagggtgaaggttttggaagcatctggattggagaagggaagccttggttgttgtaacaatagccagacatcattatcttcaataaacaataagaaaagagcctcattcacattttagagatgtgaatattgggcctgaaaagtattgagtcactgcccaaagtctgtttgcgaagaagcagcaattccgaactagaatcctggctcttctttccccattgtgtgcatgctttccatggtaagatgctagctacttctggggcaaagagagtgctttcatcctgggctgcaggtgggatggtctgaacttgagtagtaggagagaggatggaatgttaagtgacagaggtgggaagctaagtggaggtgatactgagatgctgacttaatgtggagtcctaaagagaagggaacagaaagacatatatgaagcgtttcaaacttgcaaaattcggacagtggcagccacattaggatttggaaggaagatgcagcattcagagctggtttcattgatactctacaaagggacgttctgtgatgatgtccagcagacacttgcaaatgtgaatctggagcctctgagagaggttagtgattccttcagtggttaatgctgaagggtggtggtgaaggatacagagagagaagagcggaggtcagaggacgggaagttggtgtcggagcagaaatcagaagaagctttttgagaagtggcaaaggaaccaggagcatgctgtactttggaggtgaattctgggggcaggcaggccccgtcagtgaccagccattggagaggtggtcaggccgacatcaggaaccccatcaggagggaagatggtcattaggagagtggcacagaggagaagcaaggtgcatgaaggtacggtacccatggataagtacagatgtgagagacttgaagtagctgaatggtttcctcttttgaggggagtgctggaaaaggtgagagtggggcaggacaggtttcccccccttcactaacttttccagcccagaacaaccccacctcttttgagcatctctaacgattatcctctgaaccaaactatttagcacgaagacaaaaccttccactgtcctcagtttgaggtgcaagcctggttaaaattgcacagattgtatattagcaggaaataatgtttggtatatacttgataatcatcgactgacaacactaggaattactacacaaaatggaggaagaacccaggggaagactttcttttttctttaaagaaagggcatgatgaaggacagacatggggaaaattctgttcctttaaaatgtgggaagcagttcctgagaacaaatggggttatcatgacaatgttagaaatttggggcgagtgatgccagcaatatcaatttcagaggagctgcgtggagcgctgtgtaatgtattccgctgggcatgttctgtggtgctgtgaagccagtgcaattcttgtgccttgcagcaactgggtccttttgtattagagagctttggagatgttaagagcatttggggatcttagcagaactaaaaaagatccttcttttcagagggtgtattagataagatggaagaaaactcagaggggaatagagctggataagctctgtttgctttaagcccttcagcctggatacgtaggtctagattttgtcttgggccatttcaggtactctctgtggcaaggtgcacaggttaattagctcagatatatgcacatttaatgtgtgccttggcagagatagacatatacatccttaccatttatgaggatgtgtgtctgttatgtgtcaatatatgtgtgtatatttgagtatatcatcatatacatacgtactcatatgtgttatatgtatgattgctctgaggtcagtatagtcatatatacatctgtacttatccatgagtacctatgcacatgttatatatgagcacagtacaatatatacatgcatgcagtatatacatgcatgctccgtatatacatgcatgcagatgtatatacacctgtaaatatttatgaatccaaatatatatatgcctgtgcatgtggagtttttcactacgctacacactacacatacacatacgctcccacacgccctcacaatttagagaccagtgacaccttacatttataaagtactttccatacttttctgattgtttctgcatccttttttttctattttgattcccaaagcaattttagaatgtgaatggggaaagaaaagccccataaaactagcaggaaagaagccactgagctgtccaaggacacagagcaagtcacagctagagcccaggagaggcccccggtacttgccactctaagcctactacactttgctgaggaatcagaaggcaagactcctcagaattagtaaggagcctggattatggacaattacgaagatgttccattttatcacttttctactatgcatagtaaattataaggggctaacaaagtatcacataggagcattcttttggaggatctattgtagtaaatagaaaagacagttgaatagttttctatatgaacagtgcttctaagtgcttaagaagagcttatgtcatgtaggttgagcaggcatgctgcaatgctttttatgatatttatttgttttgtcaaccctttcactccttaaataaaggtaaacttccgctcaccccgtcagaaggatcaacatggagaattagtggacctggagttcataaggttttactgtaacagcgattaggaaggaatgcacatgtgtttgtctccaggaaggttagaaatggaaataaatgcaaaaatatgctttgtggcacgtcatcatttttcatatgaaaatggaaagcacaagacagctttgttttgcctttttggggggctcgtggctgattttctcttcttgcttcctggtttttgttagaaagaaacttgttcatttcccacccactccacaccccctcccccacgctgaaatatctgtccaagatcatcctttcaagtgttcagacttagagaagggaaaagaaaaagaactgtgatttaaaatatatatgtacatcttttttttaagcttgcaaactgggatttctagactcaatttgtgttcttgagatattggagtcaagtttatgtatagtttttgatgtaggacctaattaggctctcagcatatcttaatactttctgctacatctgcattaaagataacattgcatacatttgcatttcatttacataaaaaagttagccatgctgtatgtaacaatcactttcaccaagtaccgttgacagcaaatattttgaataagcatgtgaaaatccatgtctacacaaagcctgtcctgggttctgttgaatctctcacatttggaacttgttttcatgtagtgttacttattccaatggagccctggaggttaagccaataaataaaaacgtaggaatcaaaagagcctgctttatgtgatatattcaacttggaaaagaaaggctcaggtgatattcgtttggatgttgtttataattttaactgtaatggtaatcaatgataataataataataatggtgtgacttttatgatatgttttataggaaagtgggtaactttggaataaaaatattcattcatttctttattcattcatacgtcttcggctgagtatatatggggcaaccttatttccaggtctcacttaatgaaatcaggtttatctgggccattttactttaaaagtaagcttttaccagggggactactccaccagttttctctgcttgcctcataccctgtgtccaacgaggcacattttcacacttctaattgcccagtgacttgtctccccatttcaccacattcagctattctttactccttatgggtcgcgaaacctccgggcagattctctggggtgtgcttcatccacatcagatgatgggcgtagcttatgacgatgtagactcgtctgtggtcatgggacccaaagctcgtagaacacactccttccaaggagtgttctttaaaaatgatcctaaccaaacacagctgggaattgttatatactttacctcttcttggagagccacatgcacagagtacaaatcttgcttaactttctctaagttggtatttcccaaacctttggaaccatgaagtctttgttggcatgccacctgtttatcctgggagaccattttctgcagtgattttggaaatcaccattctattttaagaaccacagaagcaatgatgacggcaaccataatattagtggctagcatttgctaggagcttctcgaatgccaggtgcaatggtcagtgctttatttgtattatctcatctaaattccctcaagaactgtatgaagcagagtgccattattagcaccgtcttagagatgagaagactgagatgtagagaggttaaataactcactctacattgtggtactaatgagagaaaaaggggaaactggagcccagctaatgttcttgtttttacaccgtctacagtctctcacaaagcctgatactcttctgtttccaggctgccactgctagttcctgcagtcatctctccgatatcatgactcaagccctccggtcgtcttggccacgttccccctggtttatccatattccacgtaaactgtgttcatcatactgaaaacagacccctggaggaattctgaggtccaaggatttgggcaaggtcattacctcctttttcctggaccatcttcttcaattaatgcaacctaagactgcaataagctcttttacaggtatataattttgtatcatttggagcatattcttagaattgtttggtgttctttcccccatgtatgcagctgatttttaaaaacagatctgtgatctatagcaagttgctcaatctctttaagccccacatttttggtgagtaaaataataatagcacagacttcatggcattgtggtggtgaacagatgagcacctacgcttctcaatacagcgtcttctacataataacttcaataaatatgaactagtataattattgtgttattggaaaattagaaattgcaggtgagcaaaaggcctttcttccaaacatttttttttgtgtatttcaatgtaattaattttttttacttaaaaattttgaattaatatctcaacttataagagcagctttgtcagtatattttaaatgattcccacaatgctgatttaggcattttacattttgatatgcatttttagctggttttcaaagtcacaaggctctaaggaaaagaactaatccttagttggcaggaaagtccctccccaaatccttggattaaaatagaatctgccgccagggctttccttgtcttctgtgattgagatctgtctcaggtgggaaggcatccggtacctgtgcatggcaagttcattctttagagatagaatgtgcaactttaatatttattgataggcacactaattctcttgctgatggtaattaatgaggtgcttatatcttattttgcggtagtttaacgagcttcgggctataggagagatccggtgcttgctgtaaatgctgagaatcaaagatgctggaggaaaatgcagaaaatggagcagaaaaaataaggttttagcagataaaatatctcagattaaaaacactctcaaaacaaaccttggtaaggcagaagcatttaaaaatcagggagagcttgccagggaggaaagtcgcaggttccctattccttgttccctaagcatgctgttaattttgaccacccatttgtctttctacccctttggcttcgtctgtgttagcagtgtgaagtgaaaaattgataggaaaatgtattttttttcttaaggcttagatagttacagccaaaacattttgtcatattgggttttgaataattgtgtcaaatctacacttaattttgccttagacagctagccttatgaccctagttaacctgtattttctcttattctttcatcctttggaaatgaggttcacagaatacaaattcagaagagcataaattctaactccttagaagacaggaatagaagtcaaagtgacctcaataaatcaaaagcaagttgaagttcaatagggacaaatgtaaggtaggatacttatgcctaatagacggactcacaattttaaaatcatctgggcatgattgtgatggaaaagtgtctctctgtcaaggacatgaggaagccacatccgcagccttgtctaaggacctactatgtgccaggcattttgcataagtcagcttgcttacaaatacactgtaataatctcaacagtaactctcaaagctgtgtataatttgtgctctcattttatagatgtggaagctgaggccgagagagggtaaataatttgctcaaatgttcacagttagtgatttaactggttttggatcctgctgtatctacttgaccaagagtacttcattacagagctgttatttaaaaagccaacccggccgggtgcggtggctcacgcctgtgatcccagcactttgggaggccgaggcgggcagatcacaatgtcaggagatcgagaccatcctggctaatatgatgaagccctgtctctactaaaaatacaaaaaattagcctggcgtggtggcgggcgcctgtagacgcagctactcgggaggctgaggcaggataatggcgtgaacccgggaggcagagcttgcagtgagccgaaattgcgccactgcactccagcctgggcaaccgagcgagacaccctccaaaaaaaaaaaaaaaaaaaaaaagccaacccagttcttggctatagtaactgagactttacttgagaaccagataataacctttccagtatactatacattaattaaaatttaaaagaaaaatgaataggagaaactggagcaagtccaaaaataccccacccaacaacaaaggcaacaagagaaattttttaaattggcctaataggtaacaggctcaaggtgtttgggattgcttagctaggaagaatgcagctacagggtgagcgacacactaatcctgtagacatctaaaaggcaataataaagattcacattttacatcagtatttgcaggtaacaaagcacttccctgtcagttgtcttactggtttctcacagcagtcatccggagcagaagtcagcaaacttttctgtaaagggctagatagttaaatatgtttggctttatgggccatgcggtctctgtcacaactccgcaacaaaagcagccagaggcagttcataaacaaatgggcatgactgtgatccaataaaactctatttacaagaagatgtgacgagctggatttggttctcaagctgtggttatgtgaatacatattatcgtttccattattcagatgagaaaattgaggctcagaaaagtaaagtgacttatcctatgcaactgaatgaataaacaatgtgtctggaacgagaattcactttctgtggttatagtttggtgctccatgaagtaaattgaagacatgtacccagaaagatttcagggaagtttgtcatcccaagataccatttgcctgtgattgtaattaaaattgggagcagatgaatcaagaagttagatgaggctgggagcgcggtggctcacacctataatcccagcattttgggaggccaaggcaggcggatcacttgagctgaggagttcaagaccagcctgggcaacatggtgaaactccatctctacaaaaattacaaaaattagacaggtgtggtggtgtgtgcctgtaatcccagatactcaggaggctgaggtggaaggattgcttgagccctggaggtctgggctgcagtaagctgagatcacaccactgtactctagcctcggtgacagaatgagaccttgtctcaaaaaaaaaagtgataacttggtttagtgaaacaatgtttgccaggcacttgagaaaggatatttgatcaaaaaaacatttatctgctaacctacaagtctattattaaagtgattgcttaagaatctttctgagacatgaattttgtttgaattatagttttcctttccctgggagagaaaataccttaggtggcttacaaattcatctgtccagttgtcttgttagaacttaattttgactagcaaagggtaggattgagagagaataaggcaagaggaacaagttagtgtttgtgagacttgtgatggggaggaaggttgtcagcaaagattactgtaccaatttgggtgccctataggaacaaattgggaaagcgttgatagtattagctaaatttactgcatacttaatatcatcttctagcacatgttttacatgctatgcttgaattaattcatttaatcctccaaacaatcttatgagataggtgatgtttttatttccatttcagaggtaggaaaactgaggcacagagcctcacagtaaatattggagagagggcacatcaaaatcatgttttctataatctgctagtgaacaccccccttcctggtcagttttggtgaacggaagctccacagccctgggatgtttgtattgcatgcccatgcatttcatgcaattggccagaccaggtgatctctcagctctttgtttctttgatagagatgtaaattgagggaagctgtggagaaaacagagcgcaagctctctggaaatgagtgcctcattactagtgaagcttgaggcttggtggcatgaactctaagtgaagaatatttcttcttgtttgctgaaagaatccttaagtgggcacttggtagcaagtttagttaaacctaacctgcttgagggctaaaccctcataaatcaaaatagctcaagtgactgtagtaaatgccaggtacccagcaatgcctagagtaattcagtctgctttatgagtgtcaaatagctaatactttttatgttccttttttttttaatgcgtaggaaagcttttgcagatacgctttccatgagagtattttgccaatatctcccttgagaaaatcaaaggaaacggcactgtgtttcctctttggattacaggttgttgttttgttttgttttttcaagccaactatgctcacagatacctaaagtgagatttatacatttaaaatcaaacaacaaaagcaaaacttttgtcattttattagtcctaacatcattagttttaggatatcattattagagttccttcccacatttctatccttctaagaaaattgtcttagaattcaggaactttaatagcagttctatagaagagaaacagattgagtgatgagataatggatctcatgagagaatggatcaaggaagagaatgcagaagatgcagatggtggaggaaaaggaaagaaatacaaaatggagagaggaaggaaatgacaagaagccagaagtgtgtgcagttgaatgaggggggtgggaggaaagctggatttggaatcagaagatatgggttcagttcctacctctgcctttgcttaaatgacctttgccttcgcacttgacttcatcagaatctttttatatcatgaagtaataatcatataagccttacacgatgtttaggtgacatgatgtagttgaaatgtgcttggcttaatcaatatatatgcatggaatctgagagttttggaataacagcagaacagaaccaaggaaccaggctcattgatgtaagtagaaataggagggaagaacctgagggagtaaatttatttgagtactcccagccaacagtcctcatctccaggttctaaagtcatgcaatgttcttattgtccactgggcataacacagcacccccttgcaactaagtcctaatatgacttcattgatgtttttatttccatttcagaggtaggaaaactgaggcacaagggatcacagtaaatattgaagagagggcacattaaaatcatgttttctataatctgctagtgaacactccccttcctggtcagttctggtgaatggaagctccacacccctgggatgtttggattgtatgcctgtgcattcatacaattggccagaccaggtgatcgatctctcagccttttgtttcttcgatagagagtacttgcaactaagtcctaatatgaccaaggtcactaattttcactacaactttataagccaagaatagggtctaggatatggaccgtcttagatatggattcttaaagggatgatttttagcacttcagggacatctcagatgggactcaagatgactctacctgaaacagaacctctgtatgatagtattagattcaagtcccagggggccctgaaaaattacctgtcccaaattctctcaaatagaagtgtttcctctcaaaagctagggattttcataaggcagatttacatttaattctactcttccagtgtctttctttttaactcaccatctgacaaggaatagttagcatataacccaaagcatatgtggtaagcttgttcctccctgcctaaatatgagtttaataaaaaatagcagttaaacatatgttaaaaatgaagcagtacagttgggggcaaagaagaaaaggcaacacaactgtttattagttgtgtttttcattttcatgttcagagaatttgaagactccaattttttttccaagctgcagtcagatctgcacagttgcataccctgtttgggtctttatttcctacagatgaacactaggctgacatgtcgaagcccatgtccaaagtaatgaacaccaattagcaaattaatggattaagatcctttttatgtgtcaattgcccaggttaatcatgtcaggactaataatattttacctcaggatagagctttgacattacttacagaaatcagtttaagtaagtgttaagtgatcttgattctgtggattgtagttcaagatttgtgaggtctaagcgtagtcaagacaaatcagatgtttccatttctcactgttgttaacagcttcattaagacgatctatctgaattaaaattaaagattagtcttgaccttataggtataaatagacagtctatgccccatgtctttctaatttgccagattttctttcctgtatcgtacggatgaatcaaggtggacatctttcatcttggtgtatttccaccaagctaaacacagttgtttaagcataggactatgcccagagttgtggcagtttctttcattagagtgaaacgagggctgcaagccctaagcttttgttgaaatgtgcatccttcctataataaatttttactctatcttaataaaatccatggcaactttcctacccatccctcccccggaatgggctacttttatagggaaagaaaggcagcatcaggaccaagaaggggatggagaacaccaagtttcttcttctaacagcgatggcattgaagagctgttaatactcaaagtgatgaatcactaatggcatatgacattctttcagattcgcatttgtatttgctactcacagcagtcttgtgaagcagtaggcaaggtgtctgttttaaagtccaccttaaagataaggaaaccgagactctgataggatgtttatcctatcagaggtggtaagtggctggacctgaccctttctatgccccgtgtctttctaatttcatcaaatggataactttctatccttggagttgcccttggtcagagtcagcagagaggaagaaaagcagtatgcctgttcctgcaatttttctacatcaacatcattaatttccaagtcattttcattgtttgagagtgggtatatgtatgcagcttttctaaagcatagtgtactcagttgtggatttttttttctaatggaatcaagtaaaaggcattaaaaaggggtaagtcaaatgtgtacaaaggaaaagaattccatctacatgcgcatttttttccataggatttcttccattcttggaaatgatagcataaatgacctgattgtagttataagtcacaggtggaaagtttagttttcctttccttctgtgagtcaaattgattccacccctcagggaacagcccagtatcagacatgaccctcttcctcagggctgacctgtgctcattcctgttcatgcgttcttgatcacctgctcgagagacccagctgatatacctggcttgtgggtgcagctggaatatggccagatctctttagagagctaaatcaaatattttcattagcccccttaaacccaataaagtaaattcttgggtcccatggaggaaaaagaatagtcatgagatgcattagacagtgggtttcattttttgtcgttcatttactacacacacacacacacacacacacacacacacacacacacagagagagagagaattttgaaattctttatacctccacatgtttatccaaaatttgacatttaaattttttttatcataagtttaaatagttcaatagcagaggatttaatttctggcattttataaatatttacatttaaaaataaaacttgtcacttttgaaatgtatctagtgaaatctaaatactattttggtgtaaatgtttgctgtcattcattttttaaagaaatacacgaacaagctcttttttgatacccaaaacttctacatcttttttcttttatcctaattttctattaggataatttctattatcctaattttatcctaatgttatatattttatataacattaggctaatgttatatatataaatatgtaatattttttatatatgtaacagcctaatgttaaatatataacagcctaatgttatatataatatataacattaggctaatgttatataaaatatataatattagcctatataacattagcctaatgttatatatttttatgcttaaaaatctttcattgatcatgctgtcataatcctttgtaataaaaatatgtgtaaataaattttttaaatcctatgaccgtaaaggtataggtaattttttaaatcttctagattgatttatcattacagtgatttttagaacaaatttgatcaaaacaacacaaacgtattgaacatttcaataaacaattattaaatatagaagttaatgtctattagaaatatatttcttaatgagatggatggttctttatttccaattagtttttttacctatggatgaatgttatttttgccaagggttcaatatcaattccattccttgttttagtccgtatcatataaatggtgagaaacattgcctatcaattatgtgatgggaacagagtttcattagagcaaggtcatttccattttgaacctctgaattatacacccaaaacaaccaaccacctaccttggatttataatgtcttggttatagaaggcttacttttaacccctatatcaaattggtcctttctggggcaagaactccaatggtgttcatagccctggacaggcagttataatagatttgccataggtgaaaattatgtctttctgcttgaaggtaagagaagcaagcttgtaaatggagagatgagtaaactggcatgacctcttaaccacaaatgcattatcagacacatttaggaaagactccgggaaattgagattctggaatttaatttccttagaattatctatgtccatataattctaggaaggatttttgtgacacttcaagaggatacattttctagtttgaaaacccctgtaatagagatagaaataagctccaaaaaccaaggacaataattcaaagggagttagaacttacgagagtagggacagtcagttgcatctagtgagcactgataatgcattcttcaggcagaatgtatttccctttgattgtaagttcatggtctttcctgagaaaattccaactgtgtctgatggggagtctggagaataccactgctggaattggtgtctttcagaggctggcagaggaaggagcaacagcatggattgtgtgcagcaggtgtttttattaacacatgcattatcacttttatttgtcacttcatggagtcaagtgacctttcccagggcacatgggcagacttttcccagtggctgttcctgggcttcagagtacacccaggggaaaattatctgttagttactttctccctcttcttgacaccttctgagttccaacgagtcagaagataatcataatcagaataacatctcaaaagagaagctaattgcagttttttcttagttgcaaaagaaatacatggtcactgtagaaatcatgaaacacacagcacaaaacaataaaaaaaaaatattacggccgggcacggtggctcatgcctgtaatcccagcactttgggaggctgaggtgggcagatcacgaagtcaagagattgagaccatcctggccaacactgtgaaatcccgtctctactaaaaatacaaaaattagctgggcatggtggcgcctgcctgtaatcccagctactcgggaagctgaggcaggagaaccgcttgaacccaggaggtggaggttgcagtgagccaagatcgcgccactgcactccagcctggtgacagagcgagactccttctcaaaaaaaacaaaacaaaacaaaacaaaacaaacaaacaaaaaatatatatatatggctctaagcctaccactaagaggtgactatgaacatttcagagtatctgtattcatgaggaaggcacatgtacacacatacacagacatacgcacactcctactcatggccaagagaggaagtttatatagtttagactggactacacctgagtttaggttttcattctctcattttccagtttcttcatttgtgaaaaggccacaataatagtgtatactttattgtgttgttgtgagtgttaagtaatgcaagtacatttagctatacgcttagaacataagcattgtatggatatggataatacatatatgtgtgtgtatgtatatatacatattatagagaaagagagagagagaaagctttcagatttcatttttaggttagcaacatttcctcagcatttcattagttatgtatttgttgtaagcataacttttgtttttattttttgagacagagtctcgctctgttgcccaggctggagtacagtggcacggtctcagctcaccgcagcctccactttccaggttcaagcaattctcctgcctcagcctcctgagtagctggtattacaggcgcctgccaccacgactggctattttttgtatttttagtaaaggtggtgtttcaccatgttggccaggctgatctcgaactcctgacctcaaatgatcagcctgcctcggcctcccaaagtgctgagattacagacatgagccaccatgcctggccaagcataacttttaatcacatctgttgtatgaatgtaacacaattgacttaaccaatcatcctattgttgaaccctcagattgtttccatcaatttgctaaacaatgctgtgatgaacatcctactgcatatgtctgatacaatacgctgctaaaagtggaattgctgcactagaatctgcacatttaaggcatctgcaacatgttgcctaatttaactccagaaagactactcatttctattccaactttgaatagacataagagtgcctgtctgcataaaccttcatcaacattggtattatctttctttttcatctttgctaattggataagttttaaaaagtgtaacacattttagtttgcatagctttgattataagtgaggttcgacattttttttcatttctttacactttaaaaaatctaaccgtggcaacgtttgcaggtgtgtgttcttcttatgttgctgagtgttatttactcccggacccatgtctgtatccatctctgttttctgcaggaggcataaaattaaagttcagcttccctagaacgggtgtgtatgtgtaagaggtttaatcaataactgacagaggaagtgggggttcagagtaccctcccaggcctctgtggatttcttctctttcaacctggctgctgcttctctgacaggtatacttcttagctccggggacctggaccagacagccctcactctgcccccatgtgccttgggactctggaccttgcagaaatacttatggcctgaaaaatgcaaaaggtcgcaggcttatttttagatgaaaaaaaaaaaaaacattcagactccattttaagcataaagaattctataataggatgcttcctcttgctgtattatttgtattgtacgtattagtctgtctctctctctttctctctccctctctcttctctctcctctctctccccatttctttctactcctcccctctccccactgccccctttttggcaaattacacttttccatgacaagaagtaagtactgtcaataaagaaagcaaatgcatgacaaagatttcaagagttgaaacctcctcttgtctgactccccttcactctgggatctgaaccgtgtgacagaagctccctgtggcgtgtctttagtccctccacaatgggatcttgttttgttcctcaaacatttttttttttgggccatgaaaaaagatttctcatagagagggagagagagaaagaccatgtgagagagagacagggaaacagcggtgtatccaaggcttattcctttccctactcgttctccctgttccagatccttcccatctgcttcccaccaggaaaagcacaaggccttgttagctacggctggagtgaatcacagctattatctgtacctttccccagatttcagccacttctttcttcttctaaaagcagtcctgtataaagataatttcttctgtcttcccaccacccatggctagctttttgttttgcattttgtagttgaaaggacatgaaatagactttaaaacttgcttggttaaataaatattcacaggcctcacttagacacacaaacccacatggtcagtgtgactacaataagcttatgaaggcaccaaagataaatctagtttgtctttgaatttcaaaagttggcatctcccagctggaatccttgagtgggcctgcattcatatatattcagtacaagcataaacagcatcctaattaatgaatttgttaattcattttgccagctgagaacaaaaaacattgtttggtctctagccattgtgtgtgtgtatatgtgtgtgtgaatttggaatccccagatttcaaatcactaaatcagcagattacatagtctcttcagtccttcaagacttctaaaaggcttggagattatttcttataacggttaattgttaggaactacttttcgttttaaactgcatactatatagcctatataatggatacatagattgatacagaatgttggttatgtctttgtattttcttttcttttttttcctttttttttttttgagactgagtctcattctgtctggagtgcagtggcaccatctcggctcactgcaacttccgcctcccaggttcacaccattctcctgcctcagcctcccgagtagctgggactacaggcgcccgccaccacacctggctaatttttttttttttttttttgtatttttagtagagacggggtttcactgtgttaggcaagatggtctcgaactcctgacctcgtaatctgcccgcctcttcttcccaaagtgctgggattacaggcgtgagccaccatgcccggccctatgtccttgtattttcaagtgacttacagaaaaccagttctgtgacactggtaagctcaagttatttatattccctggctgggtgtatctaataactcttcaaattggagcatcacctccatggatgaaatgctcactttgcggagtttaaaccctaaagcggcatgatttgcttgcagagattggccctcttgactagatgacacttcggataaagtaaaaagtaggctgactagtttctaaattaaaggtaggctgcatttggagacgctaacatatttttttcaatataatacaatccctttaatatttttatatggtattgttttaacactgagcaagacgccccaaagcccacgattaaattaggagaaatccccctgctgcttctattgaatcgagttaatataatgactttattgttaaattaaacaaaataaaacttgccatgtggaagaaatatggctgatgatatcacagtgggatgtggtttttgccttcctaccttgcttccatgttactcagaggtagctttattggttcatatgctgcagcttcaacacactgacgctgcatcccttgggaggtgaaagctgacaggtaagcttggcacatgaaccagaagggaactgaaacctctcagggtggccagatgggagggccagccttcctgggactaagtcctccttcctagatgcaggtactaatgtcatgtggacatggtttctatttccctcccattcattctattgaaagacagacatgaaaccagtcagcccgcctcaacagcctggcagagaaaggagctcatttggtggccaccagctccccagctgccctgcctgttcatggctgcccccgtgggccacgctctgtttgaagttggctgtctccactctaggactgtcttctttcctcctgcccacctcagccgactcttgcctggatctttgtatgactgtgcctttcttgtcgttctgttcttggtttaaatgccccttcctcagagagttcttttttccttggccacatagaagtaacccctcagtcactctctgtcctattccttgatttaatttttgtcatatttcacactatcaaatatttctttcctattaactggtgcttttacagctgttcactcctcccactagaaagtgaactctgccagcacagttaccatgttggcttcccctactgtatccctagtgtctaggacagagccggcactcaggagatacttgttgaaagagtgactccacaatctacccatgtggccttgggcagccgtcttgacttctctgaattttgattgcttgcttatagtggtagatataataaatgcccatctcccagcggcactgtaaagcttaaatctatttcaaggaaactagcccagcacatcacgttagttttcttcctctgactcttaacatttcagcttcaaaggctttgtgctcctcttggagcccttaccttactcagccaggaagcagattattttgtggttgatagttccaatgggaatctgagccctaagttgagttattaatgacctttttatagcacactcttgcgccctcacagggatttttaattcatttttcaaaagcgttgtttcctccagcagaccatggattggtaactattgtgtttatcacagtggtgagggacagagtgatgagactgcaacttgggatgggacaaagcaggccagggccagaatgttggaaggacttacaagaaaccagtgggttagacatttgcccaataataaggtaatttaaaatggagtgtcctcagaaacctgcttgatacttttactaacctcagttaagagaggtcttttttttccatttatttttaattaaaagatcatcatgagctggaggaatcttcatagtcatttgctacagtcttcttatcttaaagatgaagaaactgaggcccaagagggtaagatgcttatctcaggtgtccccacatgatagtgacaagctgggtccacccaggtcctctaattccctggctgatcacttcccgctttgcttgcctgatctccctctggaaatggccacctgaatttctcctgctttcatttaatttccctaaagcctcttataagggtcagtcatgtgctggacaatagtaatcaaattgccctttttctttcttctgaggtcaaaaccaccccaattccactaaccttcactcaccaggtctattttccgtcaggttagcagcttctgttctctggttcaatcctctgcactcacttttcccctacttgaagggcagtggctggacaccacctctccctgctctcccaggcatgctccctggacaaggatctccttgcctttgaacctgtgatcctgatgtcccttcactcaccagtgtgtcattatccgtttcgattatgggatgttcactttgcatctgatatcattcccagtcttggttcttctcatcttttacattagttggctggtcagtagaacaatctgttcccaggccttaaaatgtccagttaatcttaggtaaacctgtgtaagccacacgttaagctgattaaagtatggtttagtataatgaacatttttctttagtgtaatgaacatttaaaatattcttgccatcatcatcaagaagaactcaccatcaactgtattttccaaaagatatttagctaataattttttaaaacctaaacgctaagtatatcctataattttacatctgttaaacgattgtaactgtgaaatgttaacacttaaaaaaaaaaactttgcttttccagctgttgatctgatggaaacgtttcatgttactgtgcaggaagtcccccttgcaatcttgaagtagttctgttaggatgcctttttttgagggggaaaggggcagattaatttcttgtctgtaattcagctgtttttattttcttttcacatgcaaagtctgtttagaatttgcctccagaatctgatcctcttctaaatggccacaagccagttttcatcgccctcaattcagaacgggtggggtcaactttgaagctggtgggaggggggatgaagaacccaaaagcaaaatcttttcctttccttattgttcacatgcacaagggcctgtggatttccctaaggagcctctgggtcctcgtgaaggctgagcccccagcacacacagacagatgtacaggaagtcttgataaggccgcggcaggggcagaggtggggtgagcttgggcacatgtgtgggagagatggggcatggacacagcctgccatgtaatgaagggcatgtctaaaagacaacctgctagttttgaatatatgaagattttcccatgtgaaatggggatacaagctaatttatttggcctcaaaggtaagctaacatccatgaatataagctagcaggagtcagattccaggtctgtgccaggaagataccctctgctagtctgggctacctatggtggagtgagccttagtgggagtgagctccctgtcactgttcttttgagaaccccatgttcaaatggagcctgggaaacttcccacagcagtgtttcagggctccgtatgccgtgagaggaatctttctatcaaacgatgaggatgttttcactgctcagcaacctcttcctcaattttaattgttttctatgccaggggtccacagaagatttaatttcaaaaagaattccactgcttgaacacatcagcaacaactgcttgataaccaccatgcttgatgattttcaggctctcttctagctctgggatgctgtgactgtagcagaatccagtgtggttgtttattgtgttctggatccccctctccccctggcaaccactccagtttagctgtcttcaacctctcccaaagagacagacctccctgtcactgagcggagatagccctgatctgagcctcctatggctgttccttgtcagtttggttcttgctctgaaaaacgaatattatcatgccagtctcccaggatgctgaggtgttgtttcgagattctacagaggggtaggtgggtgggccctggccaagctgagagagacactggggacctgtcaagaatatcacatagttatcagccttgtgaagaggctgtcagaaatatacatggtggggtgggtgcggtggctcacgcctgtaatcccagcactttgggagactgaggccggcagatcacctgaggtcaggagttcgagaccggcctagctaacatggtgaaaccctgtctctgctaaaatacaaaaaaattatctgggcgtggtggcatgtgactgtaatcccagctacttgggaggctgaggcaggagaattgcttgaacctgggatgcagaagttgcagtgagctgagatcacaccactgcactccagcctgggcaaaggagccagactctgtctcaaaaaaaaaaaaagaaagaaatatacatggtgaagcctgggcaacatggtgagacaccatctctataatgctttttttaaaaaagtcagccaggtgtggtattacatgcctgtagtcgcagctactcagggggctaaggtgggaggatcacctgagtccaggagtttgaggctacagtgagctgtgatcgggccactgtactccagcctgggtggcatagcaagaacctgtctcagaaaaaaagaaagattatacatgatgaaggcagctttggttaaaaggaatagaaaaagcaaagcaaacccatatggggtttctgaacttcctctgaaattttgaagctatggttgagccacacctattggtctctagagtggattcagttgtgctcttgggcattaaatcacccatcttcaccggagcatcgtgatagtgtctgtgcattgtggctcactctctccataaacaatgtgttgaagacataaacaagagtattatgttttgattaagcctaataaatggtttccttgaggttatggctcttttactttatcatgggcaattcttaaagccacagaaagaaagatgacttgcccaatcactaaagcaaagttaaaggaaacttcaaggtccagatgggagaaaatgtgggtttctggtgacaaaatcactttttagaatcttctattgtagagatgggtagatgggacagcagcaacataaatttgaattttttttaagccataactatcatgtggaagatatacatgggtgctttctaagaagataaatgtgagtatttgagtatatcagtagactatcttaattttttaaaacacactatttgagaagcagccattctcaggggaaaaacaatttttgaagatgtttttaatattaataaaaatattactttctagaaagttaatgacatataaatatatcttttctttaaaatattgtagagaatgtcatgtaaaataaaactaatgcaaaactggaaggagaacagacttgactctcggaagattcatgtttggcacgagacagctgtatgttcgtagacaaattgttttccttctctgagcctctatttttatattgatttaatgagagaatagaccctataaatccgataccttttcacctctgaagtgctatcattctcttcctaaatcacacaaacattcttacttaatctgcaaatcagtataattcaaacaaaccaattatgttgaccctcccctccaagctcccagctagtacttcccacatcaaaacgtctgagaacaaccaattcaagcacctaacatattttgttttcagtttataagaatagcagtaatcaaacacacacacacacacacacacacacaaaccccaatatcatctcttcttccataaaaaaatttttgacccactgtggactttataggctcctaaaatgtatttgaggatggtgtaaaaattacgttaggttcttttgaagatactctttttttttttttaagacgtagtctccctgtctcccaggctggagtgcagtggcgtgatctccactcactgcaagctccgcctcctgggttcacaccattctcctgcttcagcctcccgagtagctgcgactacaggcgcctgccaccactcccggctaattttttgtatttttagtagagacggggtttcaccatgttagccaggatggtctcgatctcctgacctcgtgatccacccacctcagcctcctaaagtgctgggattacaggtgtgagccatcgtgcccggcctgaagatattatattgtatttaaagggtaactgatgatatgacacaatgtatgtattccctgtgcatttttactgtagctgccacttcattgtactggtgtagacctcaatgtgttactgaaacaaaagacctaaaattctttaattttgaatcagatataatggagatacaacaaagtatacagatcttgtgttcagttcagtgagttttgacaatcgtatatacccatgtaaccaccaattaaaacaagatgtagggctgggcgtggtggctcatgcctgtaatcctagcactttgggaggccgaggcaggcagaacacttgaggtcaggagttcgattccagcctggccaacatggtgcaaaccccgtccctactaaaaatacaaaaattagctgggcatggtgccacatgcctgtaatcccagctgcttgggagtctgaggctggagaatcacttgaacctgggaggcagaggttgcagtgagctgagatctcaccactgtactgcagcctgggcaacagagtgagactccatctcaaaaaaaaaaaaaaaaacaaaaaacaagatctagatcatttccatccctctagaaactttcctcacataagctcctaaatatcttagttcctcatttttgttctttttatttatcaatgcataaacaagaatcactggaaaggggacaatttgataagcaaggaactttcacagctacctgcaagaaaacgattttccccttgaacttgactcaaaatattgactgcttttcttgaacagaatggtcagatgtgcgttcttttttcatattcatactctgtggtggacataacaatgaggacataaatatgtggggcgtactatttggtgttagtgaacacttacaaagaagccttcactgtcttgtagggaaaccccagggtattctgccagcatatcacgagactctgtggaccaatgcagtgatttgaaaaggaatacacatcaggcatttttgagggggtcttgagttgggctatcagatctgtgctcaaacgtctggggacaagagaccttgtgctataggctttttactaagtgagcgggaggaagccccaccagtttgaaggaaggagacctggtcagggggaggaaggggaggggaggaggaacaaatggaggaagatgcttcttccaaggtcacgcctatcagaatgtggagccaggaaatagaagggagcacccatgaggccctgaaggccaggaggcctcgcgctggccgagaatcatttgagaacactcgggaagctcagctgccacacctgaggcaggccctcatttatctgagcctctgtacccggagtgctaacaaccagctcaaattggctgatttttccacatttgtcagggagccagctgcactggctcagctgagcatctgcggaaaggaaagaagagaaccagaaaaaaaaagaaagcttttaagtcattattcttattcatttccctattctctgccccaccctcccagtctccactgccatgcctctttcttcttcttcttctttttttaaaaatctttttataacaatcttttcctttatgcggcgagagccattggcatccttccagtgacctgtctgtagagagacactcctcccttgtaattaggcctttgttataccacttcctgattttcttctctttctttcccttttaaagtttctggcccttgacaccccaatgccccaatagaatatccacacttgttaaaacgaagggtcttcaaaaggttggtaaagttggctttctcaaggaggcctgtgagttcattcaggcctgtggttacaatgggctagggcatggaaggacctgaaagaagacgtatgttgagttgtcttcattctggtttcaatctcacctacagtgccctctcaccatcctgttccccgctcttggaccacttgatttctggtcacagtttttgcattccgctattcctgggctataatcatgtaggcttcagggcaggaggacaggatttctccttctcaaatcctcctacaaggacagaaagatctggtacccaaagaagcagggaaaggcagagatggcaacaggaagccaggctaatgggcctagacccctttttcctggggctcatgaaatggtagtcaaaggagaagggaggggttttgaataggcttgagaatggagatgtaggtctggttatttacacaaacaattggttacgttacattcagtttcttttaaagaaaatcggtagcagaatatttacagttacagctactacatttgaggagattcgccttggaagcctctaagtgtaatcactgaagtttttggaatataaagaagaaattatgagggcttttcccatcaggattagtgccattcacttctgttctctttgttttgaaatctgtaatgcaaaaataaataaatgccacacagcttagataaccactcttagtgacctctgtttatctgaggtagctttcagagataaacctgtttgtccagttcaaacttggacaaaacattgaatttttaatatgcccagactcatttcatgatgaacccaaagttttaccaagttacttagtgcatttataccagatgagggtaacacatgttttttgccccttttataggtcttagaatttttagatagagattatattttattttcctttgaaaattatgtatctaggtaaatattatagggaaaatgttttatcaatttacctttggtgtacagggatccaccccctaaattgtctttatccaagctactagtagcactgtttgtgggtgtctaagaataccaaatgattttgctgatggtttaaaagattgcagttaggttccttagaaaaaggagttggactggttgaatgagaattaaatgcggtactgatcataacaatgtatctacaacatttaaggtagatcccaggtcttttttttttttttttttttttgagatggagagtcttgctctgtcacccaggttggagtgcagtggcgtgatcttagctcactgcaacctccgccccctgggttcaagcaattctcctgcctcagcctccagagtagccaggattacaggcatctgccaccatgcatgcctggctaatttttgtattcttagtagagatggggtttcaccatgttggccaggctggtcttgaactcctgacctcaggtaatccaccgaccttggcctctcaaagtgctgggattacaggagtgagccgctgtgcccagccgatcccaggtcgttaacttgctttgtaagtttcttagccagtctataaaagggggacagtaataccttccccacaataatgttatgaaggtcagtgagatcccatatgtgaagtgcctgaggaagaatacttgggacatgacacatgctagaagaatgcacagatttagccatttctcagagacctgcagggtactttttcaacttggaaatgttaccactatccaagaaagagctgagcttaacataataagaatattgtaaatagacagctattacctacactgttaagtaaccaatgccaaggacaagtaagtatggcagaagagcttgatcagaagctcatgctttccatttcaaaatagtccagcactttgggagagggggtgggtggtgggacctctgcaatttatggatcagtagtttcatgctgaagcacttgaagttttttggtatgcggatccaggaaagccatttttctatatggctttctcttttaagtatcagtgttttaagtatcagttaagtactcaaaccagaccgaagtagactttatatttaaagcacagattgacttttgacttacttaatgtctacaggtgcattctgatttccagatatacatccttctcttgtatctttgtaacctgtgtgaatggctctctgaaaacatccacggtgtcagaggctctgactgtgggacaagggatgacgacagatgagtagatgatcgtggaggtaaagcttccctctcagaactgtagtggcaatgaggagaaggaagtgatcccacggtagcttgccatctatatctaggcctggatacccacttgtgggggataggaagatctagtcttgactattctttgttcccattcttatatatgttgtgtctgtaggacctaccctacatgggttgtaagggcaaatttgtaatgtatgggtcgtgtaggccctttatcctatggcaagcataggaaatacaagtacctagatttccctccgtaagtgccagtgtttcttaaaatcttaggttaacttcatcatagctccgtgcttaaccagaaatgaatggggcctaaatcctggcaactagttgaaattgttttaatcaagtcttccattttttcctcttctctccgtcattccaaacccgtgggccttctttgtgccatttcctccagcaggaatccatttttcttccttgtttgaaactctggtgtttattaatacaataatgtgtaaaagcatacattatagtactaacaacattttcatatggatcttttttacttaacactatttcacatctgcttctccttaaatccaaagacttgattttatttattcatttaccataatgttcttatttcttattgttagacattgaggttgtttctaactttttaccattttattttactttattttattttattttattttatttttgaggcacggtctcgctctgtcacgcaggctggagtacagggatgctgtcatggcttgctatagccttgacctcctgggatcaagcaatcttccctcctcatcaacctcctgagtagcacaggtgcttgcagcatcaaggccggataatgtttgtttgttttttgttttttggctgagatggggttttgctatgttgcccaagctagccttgaactgctgggatcaagcaatcctctcgcctcagcctccgaaagtgctgggattacaggtgtgagctgccaacaccccgtcttaacttttaaataccattttatattttttaaaactttactacttttaaacttttttcatcttttgagccatttttttaacaaaaactcttagaattattgttattaagacacaaacactcttaaagcttttaggacttttgatatgtattgcctgtcaagttaatttttgcatgtctaaagtgatccagaaacatcctctattgacctctctaactgaagcctattacctccttgaaaacccacatttgagtctccccttacccagtctgtagtttccaagtaaatccgacggtctttattctgtctgcggtatttcattcattcattcattcattcactcactcaacaaacagtttctacttgctttactgatatttgttctttggtctttggctagaagtcagcttgatacaggaagttctgttctcttgccacctggttctgagaagaagagtgaagttttattatttcctgggtatagtccgtgtcttctcaacagggactgggttttccattcatttttaaaaattttacttttatagtgagcatccagtgattattgaataaatgaaaaatgaaagagatttggctcttgctagtttgaaaaacagttgtttgcttttttaatagacatgacatatagataaagattacttgggatttggtgacatgaagaacattttacttagttgtcagtaactcactttagctaaacctaaggtttataatttgatttttgcttgccttgtattttgagattccatctactttaactcctttataatgtttcatgcttggcaccctcaaatattgagtaaatgtgtattaaataatggtccaagtatttttgcttttttggaaccctggaaaactcatgctgtaggtgtgggtgtttgggcttggatgtgtgtgtgtgtgcatacacagtgtgtgaggaaatgactttgtaattgtatatgtaacatatttcacacattttaaattttccgttgcctcattccgagaacccaagttcttccaggatctgctgtcttatcagtttacattcctgaagaatattcatgataaaggtattggctgtttgatcagccatttcttacccgggaatgattggaaatgaaagaattacaccatttcttagcatttctgattacattttactttttattttgttttcataacttgctacaaaaggcacaggagtaggaaatttactcatttttctacttcttaataattgagttgctgcccagtcataatgtgacacaagtataattatatcctaaaacaagggctaataagaaaagaaaatcacacaaaagccttcctaatttcaaaatatcctaacacttttatactattaattgtcaaattaaaatttcatttattatctcattaagccctctgagtacataaacagtgcattagggcataattggagcttttaaaaataaaagttatatttgatctaacaagataaagtctgctgctattgattttcctgggaaacaaaaagctcagatctcagcatgaaccaaatgaaactattggatccatgagttcaaattagtggtattaatcatatgacctcagggtgtttgagtggaaagttagtaatctctgacaaaaataattaatcacagaatttttagccaaagaagttctaagtatagtgggtggacctgtgaatggactacttttcttataaaaacaaaagtaaaagaagtggttttggagtggtctggactagattccaatcctgactcgacctcagggtgtttgagtggagagtaaaagttagtaatttctgacaaaaatagttattcactgaatttttagccagagaagttctaagtatagtggatggacctgtgaatggactacttttcttataaaaacaaaagtaaaaaaagtggttttggagtggtctggactagattccaatcctgactctaccacgaacaagctaaatcacctcaggcagggttcctgcctcagtttccccatcttaaagcagacgtaaagcagcaattccactcttgagtatatacccaagaaaaacatatattcacacagaaatttgaatatttagagcagcattattcataatagacaaaaagcagaaaccatccaaatatccatcaactgattaatggatacataaatagtggtttttacatacaatggaatattattcagccataaaaaggaatgaagtactgatatatgctacaacttagatgaagtttgagaatattaagctaaaagaaagaccatacacaaaagttcagatattacatgatttcttttatatggtatatccataataggcaaatccatagagacaaaaagcagattagtcattaagaggacatgagaggagaaggggatggggagcaattacttaataagtatgggttgtttttcaggggcgatgagactgttttgaaactagaaagaggtagtggttgcagattattgtgagtgcaccaaataccactgaattgtgcactttaaaatggctaattgcatctgatggacctttcacctgaatagaaataaaataagaatacttttccctgaaggtgattaggtttaaatcaggatgatgtatacatggtggacattcaaaaaatacccttttctttctttattctgcctttatcactgtgcccgccccacaacccgcaccctttctggatgattccttctttccttcggtgtaaaagaaaagacagtgagatcatagtagtttcaactgaaaagtaagtggaaatggggagtggggtgcacataccaatctctgtgcacctggagtagataaatctaggtcagccctttaagatgttagtgtctgttaaactgcattgtgtaccttattgagaatgtttcaggtggcctttaaacatcatagagtctttggaggggtgggaatagacagagacagctacagcgtttggagcacttcatctagggcaggtatttgccaaggaagcagcgagtcgtaattctaatagtttagcagtagaggatttgccatggtcaatgggctgtttgtcagcggggcaagtgttttgcctttggctatgacttttatatattctttccaatggaggcggaacaacagatgagcaaaaatccccaaacattatgctcactggttgaaaaataggcatttcctgagctgaatggaggtaattgccttctgacctacgaggtgagcagtctatttccaggagcatcaaatgtgacttcctggctattagcatgctatgactgattgtagctacatttgcttctgactttctaccccaaagggaattaatatttctacctgtttctaggattaggtaatctgtcacttgcccccagtgtcttccctctcccaaccctccttctggcctggaggacctgcttagggcttccgtctgctacgctgttttcactcttaccacttagttgccctgtgcaatatggtctgctcacttcctgggtacttagaattgtacagctttgtattgatggattctcaacacaatggcaagagtgaaggcagagcagtgtgagtaagaacatcttggcagccaggggacagcaggccaagctgccacgaagaaaaggatgcaattagaccagcgatatgagtgggatccagcccatcaatcagtatttgcacttgagccccttctgtgtggagagcacttgtaggtaaagagggcttgccttcaagatcagagtgccagttgctagctgtgcagctttggacatgcaaccaataaatctgagcctcagttttcctgtctgtaactgagataaaaattgcttcctcaggactctttggagagttaaatgaaggcagcccagtacttatcacaaagcaagggctccctaagtggatactcagtgtaactgaatctctgtttcaaagaagtgaggtgccttcactgccctcaagaatgtctggggagacgatgaaatccccaaaatgttgtacaaatcatacacatcctgaaggatgtggttataagtctcaggtttttggtattaatgagagaagggcatcagtaattggctggaataatgaaagttgtaatacttaccatttttgagcacccctaatcctcactatgacccagaattttatgataaagaatctgtgattcagagaggttgtttgcccatctcagatctggtcaacctcgaagtccatggttttcccatcatgcagtactgttttggtaggatttgagttgagctttgaagaataagcagacttggataatctggagtctgtcttggataattatgattagacagaccgtcctccaggaaagaaggaacagctgggaccaaggcacggaggtgagaatgacgtgcccaacaataaggagacaccatccatgtggcatgggaagaaataatgagacattataaccccatgtctttagtcctgaaatctgttctgagcatcagtctacccagctgacctcagcatgctaccaatatcatcatatcccttgttatgtgattaccagtctttccatggagaggcaagtttagtcttattccaggaatgtttggcattactggacatccgaagtagctgaatccaaagtgctttgagtggaggacaggcaaagaaaatgaacaaacaaacatatgaaaaaaccaaagtgctttatttaatcacccggtctgcggattgtgttgaatcaaggtgtcagtgattctaggtggttctgtctccccctaaactgagacagagcagatacttcaggaaaacgtggaagttggtccgtacttctacaatcctactggcccagcctgacccccatgtgacagctttgagagttttcatgcagttagagacaaacacaggtcaatgacaacaactacagcatgtgatgtgtgctttatgatctaagcactttcagagcctttcaaaaactcagggtctgtgtgtctgggcactgtgaacttgaaagaaagccttcaccctgtccctgataaccttgtgttgtcctcagatgagcccatgtctaaagctcccatggccaaagacagttaccagcttctcacctagccggtcacctctgtctaacttggtatgatcactgacaactttggccaattaatgaagaggtggcctcaaattgttcaggaactcgaaaagcacatgtctgaaggggctaattgtagtgataggaaactataaaagtaaggatgttggattagaagttagctgatcatcaggagatcaagaccagcttggccaacatggtaaaactccatctctactaaacatacaaaaattagctgggtgtggtggtgtgcacctgtagtcccagctactcaggaggctgaggcaggagaatggcttgaacctagaaggtggaggttgcagtgagccgagatctcaccactgcactccagcctgggtgacagagcaagactccgtctccaggaaaaaaaaaagaagaaatcagttgactgtactacctttactctcaatccagggtcctatattctagtcccacctacttatgtcttgctgtgggaccaccaggaagtcttagcttcttagggcccagggacttttcactgctaagtttaagtaacttgattcggatccgttgtggttcccacagccttcaaatactgtggaagttttaatttaaatcttcagataaactcttaatttttgagaactccttgatttaaataaaacatgtcggctgggcgcgttggctcacacctgtaatcccagcattttgggaggccaaagcgggcggatgaggtcaagagattgagatcagcctggccaacatggtgaaaccccgtttctactaaaattacaaaaattagctgggcatggtggcgcgcacctgtagtctcagctactcaggaggctgaggcaggagaattgcttgaacccggaagccagagcttgcagtgagccaagatcgtgccactgcactccagcctcgtgacagagtgagaccccatctcaaaaaaaaaaaaaaaaaaaaagaggatgagtttcttacctagcacaagattaatttttcgtatgtgagaaaaatataccttcatagatttccaaacagaattatggcttttgaacatacaggtactaaaatttaaaaaggatttcatttttctcaatttggattagatatactgattgctctcagggcgaaacgaattttaatttagttcttctttttcttaagtgggagtaagcttttctacctaatttaaaaaatgagacgacatttaatttacgctttctccttcactcaaagatactaataaccatactatttaaattctaaatcccttctttaaagaacttcaaaaccaaggaggaaattaaaatattttaattcatttcctgatctcactcatcataatagaaaaagattcttagattcagacaagaaagatacaaaccttaggagaatttccacagtttatttccaaattttaggaaacttgatcctggaatgttccttcattcttcacctataatttgtaacaatgtgaagtcacacttgttccataaatcctgctcaaaccactctagtccctagtaatctctctgtccctccaaattcaaacaataaatgtagcccaaacctttcatttcccaaaccaaacagcatagatcttctaaactgacatttgtctatagtgaagaactagttcctcccctctccctcccaattcattgcagaccaatacttttgttaaagaaggaaataatcaaaatgagttaccagaagaatgaaacaggaaaaaaaaaaaaaaagacatatgtagtccaagcccaggcttattattattaaacgtcacagacaacacatttcactttggagggtatgtgccccattgtcaaagtgctgtaagtttctaaacactactctcaatttctgtatttatcttgtctcaaaccaataacaacaagcttgcaaatcagctctgctccaaatgaactttgagtagcactggttattacagacagtgccttattatttgtgtatgttacctcctatattgtgtaaattgtttgtagacattagatagtgtgtatttatgtgtccacattcccccactctctccaataagacttgtaagtaggtaactgtcagtagtaattataataataactattattattatactaatattaaataattaaaataattagtagcattattggtaaaagcaattaattgctattactattgtcacgattcttttttaaaaacaacaaaaatatatgtagaatgcacccttctccaacctctctttgtgagtattatcctgaagatattccattgcttaaatctagtttcatagggaaagtgtaatttttaaaacctaaaggaacaaaagcatcttgttaattatcattactcaatcggggtgctatatgttcttataaagtgaatcagaaaataattgtatatgagaaactctgtaattgttcttcacatcttggttcttatcctactaacatattctcagaaacagtttttggtattatccccagtatattaccaatccaggagtatttaggagttaaaaacacagcagagttacaattttgctatgaaatatacaaatcaaaaattatgaattctgcctcttctctatgtttacaaaaagtgccaaattctgtaaaatatttgaagagatttattctgaatcaaatatgaatgaccatggcccaaggtacagtctcaagaggtcctgagaacatatgctcaaggtggttgggttgcagctcggttttagacattttagggagacataagacatcaatcagtgcatttgaggtatgtattcattcgtttatttagtctggaaaggcgggacaactcaaagtgggagcttatgggtcatgggtggattcaaagattttctgactggcaattggttgaaagagttcttatctaaagacctggaatcaatagaaaggagtgtctgggttaagataaaggtttatggagaccaaggttcttattatgtagatgaagcctctgggtagcaggcttcagacagaatagagggtgtatgtctctcatcagaccttaaaaggtgccagactcttagttaaaatctctcccagatcaggaaaaaactagaaagggaagaggattctctatagaatgtaaattttccccaccagagacagctttgcagggctatttcaaaatgtgacaaagaaatatattttggggtaaaacactttgatactttcagcacctgctatgtcatgtgacgctatactagcatcaggctggaatttggtatcttattgctacaaagagtctattttgttagtcttaagatctctgttttattgttaatgctggtcagttgtgcctggatgccaaagggaacagagtataatgaaacatgtccaaccactctttcctggttccttcctatcatggcctgaactagttttgcaggtttctttgaaatccctttggctgagaggaggggccattcagttggttgtagtagggggtggcactaagaatttaatttttggtttatacctagaaacccccaacccccactccccacccgccagtcttcttcaaggtctataaaggtagctggcttcccatgacatccaggagaagcaggaggtgcctcgcctttatgaaaatacaaaacaaaacaacaagtaatgtcagagaaaatggtggaataaggaatcccaaaagttcacccttctataaaagctagaaaaaaagtggcaataaccatcagaatgtgctttttcagaactctggaatgtaaccaaatacttgaagtactctgggaagcatttatttaaaaacaaaaacaaaaaaccttagtcaattcttaatgaaaaaagcaaaactgtggtgtcttaacttatctgaatcccatactccaatccccagctcagcagcagccttgaaataacaacccacattcccagtgcaggcatatgagggagcagaatggaccttatttacagaaaattctaatttgatctatctggtggctgccttgaagacatgctactagacacatgtttttatctctcctgactgagaacttgctttatactaagctgctcccaagggagcacggtctaaacattcttctctactgtctaaggcaatggataacaattgggggaaacaatagactagccaaaaaacttggaagcaaagtctagggaatgacatgctgtagggaataaggtctttgaaaaggtcctacatgttcttaagattttagaagaacattcacatgtccagggctgtgcacacactcaggaaaaatgcaggcaggccccagtctcttaactctggctggccattaggctacgcataatcaggaagtgaaggcaaaggctgagtagtaaactgcctggttgagtgttgaaggtatcctcccacccccacacacaatggacacagagccccttggctaggagtggatgatttattagttccaagtgttgaaggatatttctattcaaatattaattggccactaagctaactaagcattcagtggctacacatgacgtagaatacagattttatggaagtaattcggaaaagtgaataaacaacaaataaaataacagcaataatagcaaaccatggagaggagggagaatctgattcccaggttatgatattcaaaatcttcaattttcaattagaaaattacaaagcatgcaaagaaacatcagtggcacataccaggagaaaaaaaaaaagcaatcaacagtaactgtctttgagaaagtgagaaagtgaaaacgagttcattactagacaaagactttaaatcagctattgtaaatatattcaaaaagctgaaactaagtctaaagagttaagttatgagagcaatacctcaccaaatagtgaataccaataaagagatataaattataaaatgggaccaaatagaaattttggaattgaaaagtagaataactaaaagaaaaaattactagaggggcttaacagaagatttgaacagaccaaagaaagaatgagaagacttgaaacaggtaaattgagagtatccagtcagaggaacaagaaagaaaaagatgaagaaaaattaacagagcctaggagaccggaggacattaagcccatcaatacacccataaagagcgtctcagagaagagagagaaaggggtagaaccatgatttgaagaaataatggtgaaactttgcaaatttgataaaaaatatcaatctatacatacaaaaagctcaatgaactccaagtaagataaactagaatagatctgcactgagatacatcataatcaaactgttgaaaatcaaagacgaatagagaatctcaaaagcagtaagagagaagcaacttattatatagaagaaatcctcagtaaaattatcaactgatttctcatcacaaaccatggaggccaaaggcagtgtgatgacattcaaagtgctgaaaaaaaaaaaatactgtaaaccaagaattttgtatcttgcaaaattatccttcaaaagtgaatgagaagttaagaaacctccaaataaataaaaattgagatagtttgtcactatgacacctgacctacataaaaaaaatctgaactcaataacctaaactccaccttaagttactagaaaaagagaagcaaactaagcctaaagcaaacagaagaaaagaataataaagattagagttgtgatcaatggaatagataatagaaaaaaaatcatcaaaaccaaaagttggttatttgaaaagattaacaaaattgacaaacctttagctagtctgatgaagagaaataaaagaaagtagtaaagttattaaaaaatgagagaagggcattaccaccaattttacagaaatacaaaaggattttaagagaatataatgagcaactatataccagcaaactggataacctacataaaatggacaaagtcctagaaatataaaaactaccaaaactgacactcaagataaaatagaatacatgaatagacttataaaagtaaatattgagttagcaagaaaaaacttctaacaaagaaaagctcaggaccagatgactccatcaatggattctaccaaacatttaaagaaaagttagcaccaatccttctcaaaatctttccaaaaaaatagcagagggaacactttctaactcattctgtgaggtcagtattaccctgatacttaaaccagaaaaaggtatcccaagaaaggaaagctacaggctaatatctcttatgaatataaatgcaaaaattatcaacaaaatactagcaaacagaatccaacagcatattagaagggctggacattatagctaatgggaatttatcccaggaatgcaaagtttgttcaacatatgaaagtcaatcaatgcaatataccatattaatacaatgaagaggggaaaacccatgtgatcatctcaatagatatagaaaaaggatttaaccaaatctcacatcctttcgtgataaaaactttcaacaaactagaaatagaagggaacttcctaaacctaataaaaggcatctatgaaaaacccacagctaacatcatacttaactgtgaaagactggaagctttccctgtaatatcagaaacatgatatggatgttttctctcaccacttctattcaacattttactagaaattttagccagggcaattagatgagaaagagagttagaaatgagagaagtggaagagagaaagagagaatccagattagaagaaggaagttaaaactacctctattagtggatgacatgattttctaaaaaatcctaaagaaacacacacgtgcacacacacacacacacatacatacacacacattattagagttaatgagttcaacaaagttgtaggatataagatcaatatccaaaaatcagttgtctttctatacacttacaatgaaaaatccaaacatgaaattaagaaagtgatgccacttgaaatggcatcaaaaattataaaatagttatgaataaatttaaccaaggaagtgaaagtcctatacattgaaaactacaaaagagttttgaaagaaatcatcttctatgtttatggattggaagacttaatattattaaaatagaatactcccctgattgatatacagattcaatgcaatcctgtcaaattccagctgcttttttgcagttgaccctaaaattcaagctgatcctaaaattcaagctgaccctaaaattcaaatgaaaatgaaagggacattggatagccaaaatattcttggaaaaaaaaaaaaaaaaaaaaaaagcaagggctaggtgcggtggctcacgcctttaatcccagcactttgggaggctgaggcgggtgcatcacgaggtcaggagatgaagaccatcctggctagcatggtgaaaccccgtctctactaaaaatacaaaaaaaaattagccaggcatggtggtgggtgcctgtagtcccagctactcaggaggctgaggcaggagaatggtgtgaacctgggaggcagagcttgcagtaagctgagatcgcaccactgcactccagcctgggctactgagcaagactccgtctcaaaaaaaaaaaaaaaaaagagcaaagttggaggactcacacttcctgatttcaaaacttattacaaagccacagttaccaatacagtgtagtgctgatataaggatagacatatggaccgatggaatagaattgagagtccacacagaaatacatacatgtatggtcaattgattttcaacaagggtgtcaaatgggagagaaatttctcaataaatgttgccaggacaattggatagccacctgcaaaagaataatgttggacccttacctcatactatgtacaaaaaaggaattcaaaatagatgaaagatttaaatgtaaaatctaaagttataaatctcttagaaagaaacataggtataaatctgcaggactttggattaggcaatagtttcttaagtgtcacaccaaaaacataagcaataaaagaaaaaaattggtaaattggatttcaacaaaactaaaaacttttgtgaatcaatggacactaccaagaaagtgaaaagcaacccatagaataggataaaatatttgtatataggatattttgtaagagattagtatccaaaatatgtaagaactcttgaagctcaactacaaaaagacaactgaatcattaaattaaaataaaataggcaaagggtgtgaatagacatttcttcaaaggagatacacaaaaagccactgcaaaaagatgttcatgaaagaacacatgaaaattattcattaggaaaatgcaaatcaaaaccacagtaaggtactactttatacctactaggctggccatgttgatgattgtgatgatgatgatgttgatgatcttgatgatgatgatgatgatgatgaagaaaataagaaagattgaagaagatgtgaagtaattagaactcgtaatcattgtttgtgggaatgtataatgatccagcctctgtggaaaacagtttggcagtacctcaaaaaattaaacatagagttaccatttgacccagcagttccattcctaggtatatatccaagaattgaaaacatatgtccacatgaaaacttgtacattgaatatttatagcagtattatttgtaatagcaaaaaagtggaaacaaaccacatgtccattagctgatcaatgggcatgcaaaatctggtatctccatgcagaggaatattattcagctataaaaaggaggggaatactgatacatgctacctcatggattaaccttcaaagcattatgctaagagaaagaagctagacatgaaatgacacatacagtgtgcttccattcataggaaatgttcaaaataggcaaagtcatcaagatagaaaatatattagtggttgccaggggatgaaggagagggaattggattgtctgctaacagctatggggtttctttttggggtcatgttctggaattagatagtcttgatggtcatacacaactgtgaatacaccaaaaactattgaattgtataccttaaaatggttaattttatattatcgaatggtatctcattaaaaaaacaggaaaacctttcttttcataggaaagcatttaaaaataagtataattatatacttacttaaatgtaatttgtttttagcataacattttatttttaaacagaggatcctttgttaaactgacgactgacatgtgtttgtgatttcgtaaggctacagaataccattcttgcttgtctaatcttataacactgaattgcatttacgaccccctccccaccagtacctcaaactaaatatataacatctatgagggaaaactttgagtcactgtgatcttggaaaaataatcttataatttaattgttggtggcgctataggttttttttttttttttccctccaatcagttttgaaacaacttggtagagcttaggtaaccacatacattattgcccaaacaagacgcttttcagcatggcagtaggtactaatcatatgtgtgtcagcacaacaggcataaaccagactgtcctgggaaacccaggacacatggtcacctaaacagaagtgatatttacttccaggcacagactcataacaaatacttggtgtgcgagcgaggattatttcaaaggtaatggctgctgctgttgctgctgcaggtggtgggtgagctgggccatgtcctccctcctaagccaaaagaactggtgcaagggaagcccctgcaatccctgctcactcaccagggtcagggtttccttggaggtgtggtgggggagatagggatttcttataatggttttaatgagcccgtctggggtctcctcctgagatgattagcaccttccctgtcttttgcatctaaggactttgggattgaccagggctgccttagctaacatttgtctcttcattatcagctggtgtattggagagagaaaatccacgtggtctgatcaaactggcagaattgaaatgtcgccgctgatgctggcaggcctgggctttccagacaagcagaaggagtgggtctagaaggatccatcttcagtatgctgtattctggtctgcatttgcctaaagacactttggaattatttagtctggcttcctcattttatacaggattgttctcttttctttgtgggcgatctacttagcttccatattatgcagatgggggatggtttatttgaggaaagagacttgcagaactgttgggtgaaaatccaagggttacacgcattgagtcccgcagggctgtttgctccaccacaggcttaggtaggtgaggattctaacgcccctcctgccagcatcaagtctccacctggccaggcccacgcactccgagccacggctcagcaatctcattagtgaaatgacgatctgctgtctgcttccctgggctgagttgtggattaattgctccacctccagcaaagtaccttaaagcaagagaagttacatgagtcctccagcttatatggcccaagccagtccctgctggtaggtgaggagaagagatgagtgtagggggatctgtggctctctggaaaggtcccctcccaagaaaacctcacaaaatgcaaatgccaactcttagctgagagttggaactgagatgtgggtgtatgcacatgtatgtatgcacgtgtgcatgtgtttagtgttggtggctgtgaagtaagaggggacacatgtcaagcatgtaagaatcagggaactctgttaggggtctcccgtttcctgtgcccagcctaacactgtatcagttattttccattcattcactcttcatcctctgactcctcacacatacgcatgattaccttcacttcctggagagaagtggagggccccagaaatccagcttagcctccgagggagaggggctttcagtgaaggtgacccagattccatacactcaaggcaaacatgttctgaataggaccccacatgttcatttcagtgttctccagagtgagttctaggatccaattttcttactgtttttttaagtctggcaaactgaaaatggacttcttccagaaggtctgtcagagctcaagccttacttgacaaatccaggaagatgccttgacagtgacaggactcagcctgggaaggaacttggcagaccgggacaccttcctagaatcaggcacccagtactcggtttgcctgctttctcttttcggatctcacttctaaagctttgcatatcttcacaatgtatgttatgacggattgaaattgtttaggcccccattactccctgcccaggcgacttgctccccaagccctgctaggtgcagcagcttccaagggcatctgtgctcaccctgcccaggccccttccgcccttgactctctccacagttatctttttaagacgtgtgcctcatcatgcttcttcccttgttgaaatcccagtagcctctcagctcccctcccattcaggaaagattccgggctctctgcagtctggccttggcccacctgcccagatcccacctcttcaggtccacacttgttcaccatgtccagccgaacagtgttgcttgcccttccccagatgtgccagcctttccccatcctcttttcaacgcctaggaaagccacctccctttcttcactggctgaatctttgtttgcaaaggttctgtaagctgtgagggcccctccttcaggaaaagttacctgatacggtggtccccttgccccacgctggggtggaggctgttctaggatgaggccaggccctggcatttaagttgtatgatgctgccactcatctgtggctttggggggccttgtttgggatttctctatacctgtccgcttacaaggaacctggcacagactcagtgcacgtggaatgaatgaggcctttagagggctaaaactccagaacaaatttttcatatattttggctcttaagggtcctgataacttaggagccacaaagaaaaagcagagtgaatgacttccattatcaccccagggagctaatcacactctccttagcagggctttgctcctcagaactacctggctggctgtgtgaaggggagaaatgggtgaggcagcaatttttcccaatgtatagacaaggagcctgagaggtgaaacaactgaactgaaatgagctggcaagggggtgctggtgaagagagctgctttggggttcagatacagacacagtcttcatatttcctatgacagctcccttcatcaaaacctggaaaaacaggaaataacctaagctcattagaggactcagggatgactaatggagttaagcctggggagaatctgatgctccttgacgtgggttccacgggggccagggtgggggcaggggcatccctcctcctctgttgtctgcagactttctttaaattagtcttcttcatctgctcatttacccccgggattcaaggagcagcacattaactaatgaagtcaattaacagaggtttgaaatgcaatgtcttgcaactcaggtatggattggatacaaaaggtttggccccagtgaaaaggtgacagtgtgctaaaaataagccctggtataaagtgatcctccatcagctaattgctaatagggtttccttgtgtggggctccgcagccccatggctgggcctaattggcgagtccagaggcagcattcatgtctccgacccacggttacagaagggagtgattgcagggagcctgatcgagccaccagccgttcccagaccttgagtgccaaggtgagttttctctttgttcttcttgaggcctggccctgacagtgtcacctcctccctgggcctggctacaagggtcgtgagggcaacttctgttgtaagccgaataatgttaacagctgggatgtgccgtttgtcagaggtcaccactgttacaagtttcagagtgaacatttttagtagaaggtgagacaggagaactactgcaggctacgctttgaggctgcagacttgaaaaaccagagcattttcagagcactgggcgaaggctgctcagccaccctgcccgaccctcataaacccttttagctcagacagagccctctgggtggcagagaaattgggtaggtggcaggaaaaagtcagtggctcctgaatcaggagataagcaagtgcttaaatactgctcatccacccaggagctgggccaccttgggcaggaaacttcacctctctgggcctcacggtgtgtagactagaatgagggttctcacagatctcactctgacactgagtgaacctgtgattttaagatgccctcaggtttcagcatctttcatgttcctttccaggaccctccctacctcttttttcaacgtctccacacaccaaaatacatggggcttaaatgcgtgtcctccccatgccctgctgaccaaactgcctctactttttgttctaattccggatttcccatgagtcatcggatgacttagcaaagttgcccctcattgattgttttttttttttctcccaaatgcttctcagtcaattaaagacctcatctattaactgaagagagaaggggatcttgaatgcattctggccaggtatgctggagtcaggtatactcaggtcagaggataatgataatagcaattataatactaagagccacaactattaagagaacttattcttttgtcagtccttatgctgacgaatcaacatgctttaccacatttaaacttctcaaaatccctatgtagtaagtaatattattatttccatttgatagatgatgaaactgagcttagaaaagttgaaatgattttcctgggatcacacagccagtaagcattggagcagcatttaaatccagactaaacaccacgaggcattttttttctccaaagactagagaaattttggactttattttaaaatagtgaaacgtgcagtgagacatgcatacacacactcagccatactcataacgaacactcagccatactcataacgaacaggagaatttatgcataccagtgagttccaagcttcagtgtcatcaccttgtaaggtcagtttatgtgcttgttccaacagtatcacagatgcttggttggggagtttctcccgggagtgcttcgtgagctacacacatacacatgcgtatttttatatcatagctgcagcctgctctttatgctgttgttgtccttgttgttttgccttccagtggtattattattccttgtgctcacattattttttcaccaggcttgactccaagtggctcttgatggtttccaatatgcaaatccaatctacccttaaaggaaggatttgccaacattcaattgatctgactggctgttttttcccactactccaatggcttacaaaatatttgagcagtggcaccatttttattttcttcccggatctcttagagaagcctaatctgtacaacagatgaaggcagagtggctgtgtttgaagcatgaattcgggaggcatgaccccatccactctcctctcccattcttgttctctccttaggcctggagggccaaggaagcttcaggtttcagggaatgcagcttgggaaccactgccctggcccagacagcccaatggtgggagggccagtgtcaggagctccacaccctctctctggcccaatgtgagcaagttctgcctgtgaactgaaggaacatccacatctctcctaaacattcttactggccaaaaggaaggagaatgtgactctttagtgaacacctccgcagggtctttcatccaccattcatgtctgtaaaagagcttttaagaggtttgcagaaatgctttaagaaaggaagaaaagggagcttggtggctataaacagaaaggttagttctgaggtcgagaatgatacaggggaagaggaaaaatatttaaggattgcaatggagtgaggagaagaatcacagagatattaagaaaaaccatacagagtgggaatttccagcagcagggaaaagcacgatatgtctggatccaaggccaaatgttggacatccgcatcctccgtgtgcccagccacccactgcagttagggacatgcgggcctgggagtggggagtgtgcacctgctttgtgctaggccatgggagacaccagcaaggacccatgagagaggaatttctcccttaaggaactcactgtctaggagggaacatactcaaacactctaaagcaaagaggaaatcgggaaaggcagtagtggagatacaaatgcagtgttaggggagtccagaggagggcggcttctgtaaaagtgtccaagccaaagctgagtttcctctaacacatggcatgatgtccctttccatgcttcaatatggactttgggtgacattttggactcttcatattttatcttctcaaactcattttgactccctcatcctaacttagttctcatccaaaaacaaagaaagtacttctctgtttatgcccccaaaggaagtataaaattatgactatgctttcttccaacatgagtcagttgaacccctgctataagtgatgattgcacgtggctcaggaatgtttctgtctctctcctgtctgaatttcactggagcataggaaggcccttccatttttgcttaattgcttcacagttcttttcattttagagtgtgattttcttatacctgagaccaacacaaagggaaaaaaaatctctgtgatcgtcaaggaaaaaatacacaaccgtattagtttggagggcctcagataattactggtaagctggggagagggctttattaccatatgaatatcataaaaccaagggatactatgagaaattgttggatctaatcctatgatttactcattttctcagcagcccaatgctgtgaaacaggtttcaaaccaagttcctatttcctcttgtgaatcagtccctttattccaaatggaatctgaaacagcttcaccaaggccagcagtggggagcatcttcactctaggctttggacttgaaacgaggtcttgttgcattctatatccccaggacctcatacaatgcctggcacgcagtggggacttgctgaaataatgtttgcggaattgaactgatgatgaacaaaggcagagaagtgggaatgtacagggtgtgtttgaggacaagtgaagcaatagctgacactcgttaagcctttactgagaaccagagagcatgctgagtactttgtttccttctcatttaaacctcacaagacctccatgagataggaccattagtatccattttacagatgggaaataccatagactgagtggcttaaacaacagccatttatttcttacagttctggaggctgagaagtgcaagatcaaggtgctagcaaggtaggtttcattctgaggcctcttttggctggtaggcggctgccgtctggctgtgtgctcacaggacctcttctttccccgcttctttttggagagagagagaaagaaagagagtgcgcgtgcaagagtgcacatacatgagctctctggtatctcttacgaaaacactaatcctatcagattcaggcatcacccacaggaccacatttaaccttaattacttccttcaaggccccatgagtaaatacagccacaatggggcttccaaatataaatttggaagggaacacaaacattcagcccataacaggaaactagtgcaaggttgcagagctaagaagtgttggagcaggaactcaaaccccctcccttatgctgaaaaccatgtacctaactgtgaggcagtaccaccatcgtgtatggagtgatagcttggtgtgtagagagggataggatgctgtcatcggagataatgatgatcaggctgtctgggctcagatgaatctaaagactgaatctctccctgtcttcatctccttctccatcctgtccaccagccacactgaaaaccttgcagttccctgaggctgctgcatgttgcctgcaatcctgtgaatatcctttgaatataggtgctttggtctacctagagaagtggttcttaagcatggctgcacattagaatcacccaaaaagcttttaaaaacccagaagtcagagccagattgaagggcccacactggtctcaaagaaataatgatagtaacagattataacctaatatacaaaataggaaaccatgatttcctgtgatacagattattacctaatgaattgatagtttgatgacaaagtatttacataatttcaaagaactctgcaaaaaggacttattaattacaaaaggaaaatgagtacatttacagtggagaagcttgacagtctccaccttgatcaagtgacccaagtaaacatcattagtaatgggacacacagaaaccatgggccacttcatagggtacagtaagaagttgctactgagatagtcctgccaaagatgtacagctgcatctaatcacgaggaaacattagacaaatccaaattgagggacgtattttaaaataacagtcttgtaatcttcaaaagtgttaaggttatgaatgtcaagggaggcctgataaactgtttcagattgaggaagaagagacatgacaactaaaggcagcttgtgatcctgaactagatcattttgctatcaaaaacatgatgggtacatttgccaaaacttgagtggttgtaatgtactgatgcgaatttactgattttgatgtttatattttagttatgtaggagaatgttcttatttgtaagaaaatacactacaaagaaagatgggacatcaagacaacaaattactctcaaatggctcagttaataaaaaaaaaaaaaagatttatgttgtgcttgcaacctttctgtaagtttgacatttttaaaatacaaacacacagacaaaatccctgatatccagtttgtatacaaaaccaattaaatcacaaactccagagaggagacccaggcttgagtagctgttggagctcccagttgattccagtgtgagcctgggttggccctattagcccattttcaaagtatggtccccaaaccagcagaattagaatcagcaggaaccttgttagaaacgaaaatgttctggccccaccccagatttcctgaatcagaaactctgagggtgggacccacaatttgtaatgcaccaaggttttggtgcatgcgtatgtttaaggactattggctataaccttccttgctccccttctgtccatatttgctcccaagtgcccttccagagtcagctcagcaggtttccagtcctggggctccctcaataccttagagtgcatctcagagtttgggaattatctgtttacgtcctgatctccccaaccagggttagtccaaagctcattcacacagtctctggaatagcgtaagcaccaatacatatttattattggtgcttaagttgatgcttatcgaatgaattgagggactggccgtgatgttcagtggtgtttcccctgtgccacattttagcttcatttgcatgcccttaagaggcatgcactgatatgtttcaagtgtgttctgtgatgggagtttgataaggggctctgtggaggcaggggagatggcaagcatttgtaaccacattcagaagcacccccgcctttctggaaccagtactgaagccttttactaaaaggtgcctgtgagcggctgggctttctaattaaaccagatggactggatgatagctgattagattcctgacttactgatctgccttctatttactcacataaatacgttgatgaaccagaagtcatctcattcaggaaaagcacctcactgaatatttttagaaaattaaacttttatgaatgacccagactgtgagcagctcaaatgccaaagtctgtttcctatggcacttgcatggttgagctatcagcagggggaccatgaacaagtttgtttctgcaaatatgtgccaaaacaacagcaacaacaaattacaggcccgtcagtcattttggatggagaggagcacgtcataatgatagacataaccagggacatgggcacttctttgctttaactgcttctgtccctcctagctccattcgatgttgtcacattttgttgatgctgattcccaattcaaattctctgttaattggtaatatttgggggtaggggtaatgaagtagaggctaaaaagaacacatgatacgtgaaaacatatatttgtaaacatgcatataaatatggtacatctgtcaatgcataaatatatatgccgatgtataacaaaaattatatgtcatatgctttaaaaaatctacaaaaaatatttaagtatctatatacatacacaaatagcaaggacttaaagtcatgatgtgtcttgaggaactcttaacttcaggttctgctactaattagaatctatctccatgccctgtagaagatagggagttggtcccagttggactcatggataatcattttgggtaatgcactgctttagggtatttccaggatcattctgctgaggtggcagaagagtggaatatcctaaagctatgacaccgattcatggccctgcagaaacatcatggcagttgagagtttaaacctcagtcccaagttgctcaaattggctttgacagtgaaaattggtgctgagctggaccgacttccttggctaaactgtataatcagaattctattcaatcacacttaaagagtattttgactgcctgttgttgctagcatgtgtttacttctgtggctgatgcaacatatttacaacataccaggtttatcagaaatgtagaagcattctctcttacagtgaaagccaaggtcaggttgttctctagaaagaaggccagtctctggaaggtcagagggatgtaatcccactgtgtaacattctggttacttattcattcatctaatacattcctaccatgtgccagatattgttctaggattagcactggctcccaagaaaggtacagtcccttctttcttggagcttacaaattttaaatattaagtcaactagccattaagttttgtgaaaacagaaatgaatcacattggtggaatgtgcgagccagctgggaaataaaactcatcttccagaaaccaatcagaaagccatgtctagagagtattattatgagttgaattgtgtcccctcaccacaaaattcatatgttgaagtcctaatccccatactcagcatgtgaccatattatagatagggtctttaaagaggtaattaagtgaaaagaagtgactagggtaggtgctaatccagcaggactgatatccttataagaagaggaaatgtggatacagagagaaggtgatatgaagaaagagggagaagatgaccattgagtggccaaggagaaaggcttagaacagacccttccctcaccatcctcagaaggaaccaggtctgtggacttcttgatatcagacttgtagccttgtgaggcagtaaatctctgtcatgttaaccactcagactgggtggttactttgttatggttacttggttatggctgccatactctattacggtagccttagcaaactaatacatatatattaaaattctagcacatggacagggaatggactggcctgattggggagggttcgtagtagggtcataagtgtgagacagggtgaaggtttggtcaggttttgagtagagaaagaggttggcataattagtgtttcagggaaaaaagaaaattaaagaaaccagtgcttggggagaaaaatagcgcttgcaaacagagaaatcaagttgcaaccttctttgcatcttaatagcttcatcaatgtgaaagaggcttctgccctctccagaggactcattccccttgatgtcatgtttattgaattgtcttgttttacaaagatgtaaaatggctttgtgttgggctagtttcttcttctgctcagatatattaagttcttccaatgtgagactctctgtgtctcatgtaattatacagttaggcatttccttaatgctggaatttagttttaagcccagtgtacagagaccattgctaattctacatttggatttgggccctgactactgggccttgggacaacaccaggacactaactaggtggtgagagaagcaacaggactgagaagagggtgatattttgccatttgtgttctattgctgggatgctctatgacagggtattgaaaaatgatgctgggaaggaagggtggaccatgagctccaagatgtcaaaaactggtggcgggacatggggcttccactggtgctgatgggcttaaagatcactgcagtacccaaggcccataataccctagtcctgttggactaagaaggtatcttcattgagggataacttcatcctatagttatctcagaatctctagaacctaatctatgcctggttcatcgttggcactcaataaatgtttgctacagggagggagagagcaagagaagcttctctttggtccagggaacatccccatagcataattagtatggcgtaattcagtgcaacttatggttcccaagagtctcaaacaagagctctccttacccactgcccctgcaccactgcttctcccagaagggtcacttgcatatgcttctgaagccatcctctcagtggccactccagccaccacttccctttcctcccacatcagcaactgtggcgctctttgccaaagggctgcagtgattgaagacagacagcagtgttctcaactagttcctcccagtgcattcataagctcccttggcaactgctcaggccacagtgtgctgtgccagcaggacatctcaccccaagtcttgctggctgtactcacctgcatttgccacaaggcagcactgccctccctacactccccagggccctggagtatttactagccatcttattctgtctctccccaggactcaggtatatggctacaaggaaaggagcagaatgaaatcttagcatgaccctctcccctctgctccatccccaccctcacactattcctctcaagactcattcttttcagaggagggctttcccaggaagcaccctagagcctccccaaccttccaccagccatacccgaatcctagggtgagtagcagtaaggctcaaactgggatctctgcttcataaagaaatgggctacccaggggtatcctcttcatctggacaccacacctcatcttatacagataggcatattaatgcctcaggcaccaaaaatattccatagagccccaacatggcttcaacagaatgggaaaaccattcaggggtaggaatcagatgaacttctacttgaaaccagactataccacttaccagctatgtgaccatggtcaaattattaagactttctgggctatggtttcccagtctattaaatgagatgattcctatcttacaggacaacaggggttttatgtgagagaaagtgtgaaatgaaggtacactgctgcctgcaaataagaggtgctaaatccaccttgcttttcatgtctctccattcccttaagttagacataaggaataatttgatataaatctttggctttaagccacccactgatgaacctccccttgaatatcccagccagaaagcttgtgaagagttcctactgtggctaggatactgcagaggaacctgagcttgttcatgttagccagggctgaaatccacacctgtctgccagagtctcctggaatgtgctagcagagctaactgggccattcccgctgagttctatagcatttagtagaacactttcatcaacacatagtgctcagaaagggcttcagatgaagctgagggggatgccttcagcagtcaggtgcacaggagcagaggaatgcaagggaaacctcacaaataagtgcaatttctttattggcttaccccgtccaggaggccaaggggccacaacctagataatgccagcatcctttccaccaccacccagataattgctctaggcccaagagaaattaacataaacctctgtaggttccctgcagacttggcccttttcaaccattgcttccatcatccacctccatcattcctcatctctgctattcaggcctaagacctctgcttagtcaacagtgccttatgacccatgcctcaggcctgtgctctgcaacaggggctcccctgcaccatctgcacattctaacttctatgcctttgagcagttaagagcacacactttagaatcagagctgatcttacccattggctattcagcttgggggcaagtcatttaccctctgaaaagttcaatttcttcgaagcgtaaatggggatagtcatatctgcctcataagcttgagaattacgctatgtaccatgcatatgcatgtagagcatctgagtgtctggtacacagtatgattgctgcttataggcatcatggtagtaggaacatagaggtgattagatacatttacttaagctatttcccttgaaagtaatactctcttcctaccttttaaaaccctacctatttttcatgaccacaaatggtaccacctccatgttgtcttcccaatctcctgcaaccacttactttgaacataaggtgcacctattttctatgacttccttggcctttatctcttgctaccaattcttctgagcaaggcttgtgttttcccagtttgattgtcagccctttcagacaaagaccatgccaccactctcaacagagtgttacaacccttggctcctggggaccatgattttcagtgaagagcaacattcatgtttgggcaggtggacgtgttcaggctgccaagtgttcattttatggtctctaaaatggtgtgctaatgtttcaaggacagctctgaaacagctagggtaaagtggaggagagcggggagcagtccagcctcgactagaactctaagtggcatgtcgaggggctgctctcagaagaaaacagcttctttggtctgtgcattccttttgggaccaggtaaatattgtttaagatgagtttgggaatttccaggttgcctgagacactgtctgagaaccttcttagtacttggttctgacagcaagtgctgaagcggaaaaaatatttccatccatctgcactaatctcttgtttctctagcagttagaaagtggggaggggaaatgagttaaaggctgcatcaggaaaaaagctgaagagccaggcttacgctcggtctgtgccaggtcattttctagtcaggacaggaaatgccaaatttctgtagctattgggtggaggtgctgggaatataatcatttgcactgtgataattgaaggcattgaagaagaaagctcaactttaaaacttccagaaaagcaaagatactcggaattcaaagcagctcactctcactctctcgcctcgtggtcacagtaagaagaaaacagcactcggtcaggaccggggcacctttcaatgttccaacagaatctgcccatctgcagctcatgcactgggccaaacaaatacaaaccccagcacctttcacatatatattcgcaggccttccgtgtttatatgtctaaacccagcgcatgtggtgcctgtgtcagttactgttttcaggctgggaccccaggaaccataaacctgatgagggctttgtgcctacattcagctatacaatctgtgtctcattacactgcccatcaagttagcatgtgcttgtgttggcttgagctggcggttctcagtgctcctggaggccggccaggtcgacaacatatatcggtggattaaactattaaagccataatggcttctttcccctcttcctccctcctcctttcctttggcccattcagagccgggaaagtctttcaaaggaaagaggctcctgcccattcatatcttaggccaaatttaaagtagcagctgagacgctttatggcaacacaagtgtggttacttcatattatcggcacttgacttttaagtctctgtcacgtatatcaatgggtgataaacattttcttcttgttacctttttttatctttgtgaatcttggcttcaaggaccaggtgtacctgtatctcaggtgggaagattgaggctggagcaatgcctttataggaccatcagagaactcttctgtgaacagatttctgttgtgcatgatgtaccttttacatcatgcagggcattgtagcagatataggagttatgctttatttggtccccagcttcaggtgactaacagtccaatcagaatccatgcacacagagatcagcatgacacaacatgagaaaagaaatgttatgtggggaagtgtagcaaatggaacggccaggtgagaggccagagagatctaagaatgtcctgaaggaggtgagatttgcccttgaccttgatggagtggtcagacttgggaaagaagatgaataaagcctatataaactgagagttaagagtgaagactggagacagatggctttggcttaaatcgcagttctgctgcttgctatctgtgtgaccttgggtaagttacttaacctcagtttcccagttatgacatgggaatgataacaatggtgtcggtctcttgggttgctttgaggttatttgaaataatacctgtaaagcacacagctaaaaaggaggaatgatggtggtgatgcagggagaccaaagagtgaaacagtctagagtgaagcgaatgtgttaaaatccagaggcgatcaagtgaagccagcctttggaggcccgtagaagtcatttggaggaatttggacttcgtgcagtaggaaagagggaaaactgtttttagaaaaaaaaaaaaaaaagatttgtgtgccaaagtgtaacatgatgaaaatggattttaaggagaaactggtgtgtctgcaattcatctctcctgatcgtgtaactctctagtcgctgccccattcagtagatcagctgcacagactcctaattagccattccagtaggccaaagactattttttgagcaggtattttctttttaatcagatggacaattgtattgcctaaatctgtgtctatctcaagtgctatctcagctgctacttcctaagagagtcccccacctttgaggatggtttcaggagaacaagtagaaatggctggctcatttgcttgtagaggttgtctttgctacaggaattgcatgagagcaccatgcttgttaaatgtgccagccgtaagctaatgattttatgataaagattcttctttaacatgtctctatggcatcatgtaattttggagtgggaagggaccacaaaatcaatctagtctttgtagcaatgagagggaggtaaagccaggtggctgtgtaaaccaggaagtgtccagaacctcatatcctagtttcaggcaatttttttcctcattccacacacacacaaaaaaaatcctgttttcatttatttagggggtttcaaaggaaagttttacaatctatactggctatagggaagtatagaggatacctcctcttgcatggcaagcccgcacccttaccccaaggccaggaaagagagatgagaaggaggccacaagtgctagatgggagaggaattgagagatttttcacagatatgtctctaccataaacctttatggcaaaacaaaacaaaacaaaaaaaagccttctctggaggatcatgggatgcagcagtagaagaaccttcaggaccatttaatccggtgttttttcaaatgcgtcctaccagtttcccagggtgtttaaaggtgtcacacttcatggcccactaaatgtggaaatgatgacttgaaggacactaatatgtctgcatctggagtttcaggctctttaatatgctcccattagcacggtgactctccaagaaaggatacaaacatgagccatatctataggatttgttgttgttgttgtttatttttgtaaagaacccttttattttaaggctcctggaaacatctttcaacatttgtgtgtttcaggacacactgatgttgcctaatacgttagtttaaagataaagacattggaacaaagtcactatcaggtacgtggttgaactaggactccagtaagcccttccttcagagtgctagaatttagactagtcaggctaagatgccacatacttgaaattatttgaatgtttcaggaaaatgattttttaatgtatattttgttagatctctttgggtcagtttcctacttgtcactctgttacactgagtcaagcagccatagtcctctgtccagtagacataaaagcaaggaaaagaaacaatttctattcctcttacacaaaagtacctaatggcaatggctgtaccaagcaagctggtagttctagcttttgaagtttccaaaattctacagccttggaatatgtccataaggatctctttgcaggtacaactttaataggtgtgcagttttcagacttggatggtgtttgaagagtttcgatgtctggcttgttggcagagagttggttgctgggactcttgctcttctggtgcagagagtatgggccattgcctctgtgaggtcttccttgccagccacctaagaatgtgcctgagccaagttgctgtgcaaacctactgagtggacgtctcagattgtgccatatcctgacccacaatcaagaatcatcttcccacaggacacattccaaatgtactttccatacatttttgtggatggtagattttcttaatgacagccacggctgccattatttcttagctgtcagtcaccagattaggcattttccatgcgttttatttcctttattattcacaacaatggttgctaagtctcaattatttgaccttgaataagatacttaatttctctgtgctccagtttcctcatttttaaaacagggataaaattccagcctcccagagtggttgggaagattgggtataatcgaatgagcatctacgctaggcaattaatatacagttattcagtttcaggggcaaaatttatattatatgggatattataaaatcccactttcctctccacctctaggcaaggcagttaaggcataaataatattttagacagtcatatgttttggtaagggggcagtggaccacattagcctgctaaatccctaatgactctccagggcagcttcttatcaagatgaaatggaatttgatgctccatgcacgcaaaggctcaggtaatttgaatctggtgtttaatccaatatgaacatcctttgtataaaatctctgccatcaccactttaggaaaattaatatttatatcaaacatcttctgtaatgagatatgaacttttgcccaccaaaattctagctcagattttagatttgtgtgctcccatagtcaggtttctgaataatttatttatccaattgaagaaataaagtagacgaacaatttcaaaggagacattgaatcaaagcagttggctaattattctcatttcaaggtatcctggattagggaaaaaaaaaaagactctgaaatcaagcatgcctcataggtcattttgagtattagttatgtttacaaagctccttataggataaatcatggaaagtacgggacataatatgattatatttggggaccaagtatttatatttgagaagaaaatgtagcagttcactaggataattaactcttttagaacagtctctatcttctttatgttcttctcttttctgtcatactgtcccccctttctctagctaactagctcttaccctttaagattaggtgtgacctcctccaggaagccttcctgacctccagtcaggctatttcaaaataattagtatatgtgcatctctgcctcactgaactatagccccctcagggactgagcaaagtgttctttccaacattatttaccaggcacagtgattgtcacatattaggtgttccataagcatcgacttaatgaaaataaatcctgggacattaggcctcactgttgcattgtgtttgaggaggtacgtgttgtcacagaactgttggaacaacagctacaatcatagcccttgcagttactagttcttccatgctgaaggatgacaggcacaatggagtcctcacctgcctttcttggcaaagttcctgaatgtggttgctgagaggattttagtcttttctctgcagtgagaatgtgggctgaattcacatttttaaagcactcttatagcccgcaaagtgtctatttcagtataagtgcattgtaataataccttacttgaacgcatattctaatacagttacttatcattctacccgtctgtctcctccatcgtcttgactcatttttgaatcaccactgtttagcacagtgcctggcacttaggaggcacactgccaacaggctatgaatgaatgagtgaatgaatggactacctagtgccttcccttcagctctcacctgacttatacagcagcactgtgaggctgataggacaagagtgataccatttcatagatgcagaatctggccatcagaaagattcgaaaacttgctcctgatctcacagctgataaaggtgggaccaagactcacacggaggacctccagtgcttgagctatgtccctaactcacagcttcctctacaatttataatagactggtatgtactgataattgaaaggatgagggggcctactaagatacttttctgaggacagaaagagtaatcattgtaacagtaatagctatttattgagtccttaagatgagtactcaataaatgccaaacacttcatataagtcatcctaacaaactaatatactgctaagcagctattatcgttacttgcattttatacatgaagaaaccaagacacagaatatttatgaaacctgtgcatcatcacagagctagtgcatcgtacagacatggtttgaacctgggtggtttggttcaaagctcctatactttcccattctgctatacttcctcccctaaaagaccagttttcttttaaattgtcattgttttctagcaggtcttgctctgtgagcagttttgaccttggacaaattacctgtcttacctgggcgtctgcttcctgatttgtaaaatgaagaaattagtatctaccttttggaattgctgtgagaattaaatggtaatacatgaagaatatgttttgtaaactataaagcattatacaaattaaagttattactgcccagtggaaaaaaaaaacaagtcattgtaataataatttgtttgaacaagtgtttattgagttcatactgtgggcaaagcatgatcaaaataagagaaataattctattcatcactgaacttcatgctattaaatttccagcaagagaatctgcttgccctgcttctttttgttacaaacaggctggtgaaattatctaaccagaaaggaaacaaaaccaggtaaagcaatcttttttaaaattgtgccagcgattacaatgttgttcattattttctaactgttttcaataatataccatcctgctcaaaagctttgtctaccgctttgcaatttcagatgtcatctgacctctttgcagaatatacgtctataaagtgtccttttctcagtggaatacacaaaatggataaactaaaaaaatgttggaaagcagcaaggaagaactagagaggcgttgggactgtcaggattggaagtcagcattcttgtttgggcctgactcctcttgctccaccctggctctgtgaccttgaatagagcatatatgggggccaagtctccatttcttctccagcaaaagacagcagttgtaactttgtaaaaatcgactcacaaaatcttttgcactgtataaatgtgagttcttattgtgttgaattcccaagaatatttagcatcttttgaaaaatatttgtattgcatttagaaccaggaatttttaaagacatgaagtcaatgccagggtaaccttatgaatgacaacaattggaggtcttatggaggtctgcctgatatttattgagtacttactatataatgaaatatactatatgttttgtatgtattatcatatttcctaatgttcatgagtactttaaaacgagacaatgccagcaatcttgaataacacatacacgttacaattatttttttgtttgtttgtttttgagatggagtcttgctctgtcacccaggctggagtgcagtggcacaatctcggctcactgcaaactccacctcctgggttcaagccattctcctgcctcagcctccccagtagctgggattacaggcatgcatcaccacacccagctaattttcgtatttttagtagaggcgaggtttcaccatgttggccaggctggtctcgaactcctaacctcatgatccacccacctcggcctcccaaagtgctgggattacaggcatgagtcaccacgcccagccttaagatggatttttaaaaagatacaaaacccatgttaatgtggtaagtcaaagcaacacataactggagaaaaatgcccagttttcctcagtaagtatgtattgagtcatccagtctgtcattactggatgactgcaaagaggaataaagcaagtccatgccctcaagaagctcaccatctgcccagaatgtaatgagagctgaatgaggcccttcaagtgcttggagagctcagcaaaaataactggtcttggagtctagggaatcattaattttaatggcaaaaactgtaattacttttgcaacaacctaatagttcaagaagatttggcatttcacttgaaacttcaaggtttaatagaatttgcccttgaagtttttggcaacaggcttctttcacttttgttaaatccagtagaaaccccacataggtcaataggtgatgaataccaaatccactggggcccaaacagggcactcctccataagacagacctccataagacaattgctttcaccatccacttgtaaagattttactcccatctcacatttatgggaagttctttttttttttttttatactttaagttttagggtacatgtgcacattgtgcaggttagttacatatgtatatatgtgccatgctggtgcgctgcacccactaactcgtcatctagcattaggtatatctcccaatgctatccctccccccaccccccaccccaccaccgtccccagagtgtgatattccccttcctgtgtccatgtgatctcattgttcaattcccacctatgagtgagaatatgcggtgtttggttttttgttcttgcgatagtttactgagaatgatgatttccaatttcatccatgtccctacaaaggacatgaactcatcattttttatggctgcatagtattccatggtgtatatgtgccacattttcttaatccagtctatcattgttgtacatttgggttggttccaagtctttgctattgtgaataatgccgcaataaacagacgtgtgcatgtgtctttatagcagcatgatttatagtcctctgggtatatacccagtaatgggatggctgggtcaaatggtatttctagttctagatccctgaggaatcgccacactgacttccacaatggttgaactagtttacagtcccaccaacagtgtaaaagtgttcccatttctccacatcctctccagcacctgttgtttcctgactttttaatgatcgccattctaactggtgtgagatggtatctcatagtggttttgatttgcttttctctgatggccagtgatgatgagcattttttcatgtgttttttggctgcataaatgtcttcttttgagaagtgtctgttcatgtcctttgcccactttttgatggggttgtttgtttttttcttgtaaatttgtttgagttcattgtagattctggatattagccctttgtcagatgagtaggttgcaaaaattttctcccattctgtaggttgcctgttcactctgatggtagtttcttttgctgtgcagaagctctttagtttaattagatcccatttgtcaattttgtcttttgttgccattgcttttggtgttttggacatgaagtccttgctcatgcctatgtcctgaatggtaatgcctaggttttcttctagggtttttatggttttaggtctaacgtttaagtctttaatccatcttgaattgatttttgtataaggtgtaaggaagggatacagtttcagctttctacatatggctagccagttttcccagcaccatttattaaatagggaatcctttccccattgcttgtttttctcaggtttgtcaaagatcagatagttgtagatatgcggcgttatttctgagggctccgttctgttccattgatctatatctctgttttggtaccagtaccatgctgttttggttactgtagccttggagtatagtttgaagtcaggtagtgtgatgcctccagctttgttcttttggcttaggactgacttggcgatgtgggctcttttttggttccatatgaactttaaagtattttttccaattctgtgaagaaagtcattggtagcttgatggggatggcattgaatctgtaaattaccttgggcagtatggccattttcacgatattgattcttcctacccatgagcatggaatgttcttccatttgtttgtctcctcttttatttccttgagcagtggtttgtagttctccttgaagaggtccttcacatcccttgtaagttggattcctaggtattttatcctctttgtagcaattatgaatgggagttcactcatgatttggctctctgtttgtctgttattggtgtataggaatgcttctgatttttgtacagtgattttgtatcctgagactttgctgaagttgcttatcagcttaagcagattttgggctgagacaatggggttttctagatatacaatcatgtcatctgcaaacagggacaatttgacttcctcttttcctaattgaataccctttatttccttctcctgcctaattgccctggccagagcttccaacactatgttgaataggagtggtgagagagggcatccctgtcttgtgccagttttcaaagggaatgctttcagtttttgcccattcagtatgatattggctgtgggtttgtcatagatagctcttattattttgaaatacgtcccatcaatacctaatttattgagagtttttagcctgaagcgttgttgaattttgtcaaaggctttttctgcatctattgagataatcatgtggtttttgtctttggctctgtttatatgctggattacatttattgatttgcgtatattgaaccaaccttgcatcccagggatgaagcccacttgatcatggtggataagctttttgatgtgctgctggattcgttttgccagtattttattgaggatttttgcatcaatgttcatcaaggatattggtctaaaattctcttttttggttgtgtctctgcctggctttggtatcagaatgatgctggcctcataaaatgagttagggaggattccctctttttctattgattggaatagtttcagaaggaatggtaccagttcctccttgtacctctgatagaattcggctgtgaatccatctggtcctggactctttttggttggtaaattattgactattgccacaatttcagctcctgttattggtctattcagagattcaacttcttcctggtttagtctttggggagtttatgtgtcgaggaatttatccatttcttctagattttctagtttatttgcgtagaggtgtttgtagtattctctgatggtagtttgtatttgtgtgggatcggtggtgatatcccctttatcattttttattgtgtctatttgattcttctctctttttttctttattagtcttgctagcggtctatcaattttgttgatcctttcaaaaaaccagctcctggattccttaattttttgaagggttttttgtgtctctgtttccttcagttctgctctgattttagttatttcttgccttctgctagcttttgaatgtgtttgctcttgcttttctagttcttttaattgtgatgttagggtgtcaattttggatctttcctgctttctcttgtgggcatttagtgctataaatttccctctacacactgctttgaatgtgtcccagagattctggtatgttgtgtctttgttctcgttggtttcaaagaacatctttatttctgccttcgtttcgttatgtatccactagtcattcaggagcaggttgttcagtttccatgtagttgagcagttttgagtgagattcttaatcccgagttctagtttgattgcactgtggtctgagagatagtttgttataatctctgttcttttacatttgctgaggagagctttacttccaagtgtgtggtcaattttggaataggtgtggtgtggtgctgaaaaaaatgtatattctgttgatttggggtggagagttctgtagatgtctattacgtccgcttggtgcagagctgagttcaattcctgggtatccttgttgactttctgtctcgttgatctgtctaatgttgacagtggggtgttaaagtctcccattattaatgtgtgggagtctaagtctctttgtaggtcactcaggacttgctttatgaatctgggtgctcctgtattgggtgcatatatatttaggatagttagctcttcttgttgaattgatccctttaccattatgtaatggccttctttgtctcttttgatctttgttggtttaaagtctgttttatcagagactaggattgcaacccctgcctttttttgttttccatttgcttggtagatcttcctccatccttttattttgagcctatgtgtgtctctgcacatgaggtgggtttcctgaatacggcacactgatgggtcttgactctttatccaatttgccagtctgtgtcttttaattggaacatttagtccatttacatttaaagttaatattgttatgtgtgaatttgatcctgtcattatgatgttagctggttattttgctcgttagttgatgcagtttcttcctagtctcgatggtctttacattttggcatgattttgcagcggctggtaccggttgttcctttccatgtttagcgcttccttcaggagctcttttagggcaggcctggtggtgacaaaatctctcagcatttgcttgtctgtaaagtgttttatttctccttcacttatgaagcttagtttggctggatatgaaattctgggttgtaaattcttgtctttaagaatgttgaatattggcccctactctcttctggcttgtagggtttctgccgagagatccgctgttagtctgatgggcttccctttgagggtaacccgacctttctctctggctgcccttaacattttttccttcatttcaactttggtgaatctgacaattatgtgtcttggagtgggaagttcttctttgagtatgtccagtgactctttaagattcagtttctagcctaccgagctggaaatgactgtgaaagtttcaatagtcttagatccttctcatctcttttacaaaaccagcgttggtgacacataacagatggtatgaaatggaagccttatcagttgatttcacttataaaccaagtgcagataaagatataaggaggagcaacatgggaaatgtaatgctaaagatatgtgggagtgtgtcaacaccatttctaacaccacactatgggatctgtggcaaatgcagcaagacaccagttgacaatatgaaggttaggaagctttctctcaattcatgctctgtatcctgcagtggagtgtccagctcagagttcagacgaggctacgacaattggagcagaagtggagagggctctgagttgtactttgtgtccacacacagcagctgctctgctgctcgggtccagggctgtgtggcattttcacgtgtgtagtgatactgggcgctgaatggagtggggagggaacacgatttgggcagtttatttttacgtgctgagtttttttccactttagctccatattgagaggttttatctgtgtgaagcagtgctgataaacagcctgatttgagaagccaagcaagatttggcctggcaacttctgatgttttcatcatggatagtaggagacagtttggctgggctgggaatcacgtggggttcagctgcctcaacacgttaggctgtgagcttcacggggaaggggccatgtcatagggggtgtgtgctactgggtgtaacaaggtgcctggtgcatgctaggtgcttcagagatgttggggaaggaaagaatgcaggactggacaccactactgtgctgtatctcatcactccagcacaccttaggaagaaagctcatatttcttcatcttgtccaccgctcagaatatacttctactcaactctgcctgtttcctgtttgcctgttcagatccttatatctctcctgctctggaacaactccttgacaattccagcttccattgattcctctcctgcctgaactatcagtctcttctgcatccatcctttagaaccaggagagaatagaaacaggttctagtttctagttctttaatgggtttgtgtctgtttcttgaaagcagagaataggaccgtatcttatatttgttgtgggggatgggaagaatctagggctagaattggaagatccaaatgtgtgaccttgttctttcccttaatatttctattatcttcaccaagtcacataacttgtctaagcctcagttttttcatctttaaaataggagaaaatggtacttgtcacagtagggtcataagtgttagatgaggttgctcatgtaaaaaagtctggcataaattatatattgttgtttctgttgttacttatccctgacagacatttgcactagctgggaacttcatctatttttagttactatttgttgagtgactgaggaaatgaaccatggagagtattttgccttccagaagtgacttctataactcatttgtaaatgttggcattttggagtggaaagaaaaaatgtatttatttcttctaaatggatgatgccttgtatttgcatcaccagaaaaagcagagacattttttcatccaattttatttttcttctttaacacctgtgattttttttttttcagtcatatttgcctgggaataaaaaataggctctccaggtagttttgtccccatccatcctctggaaagaactttaaatgctccctttcccaaatgtcttttaagcaatctgggcgtcttgggcatgtctcgcatgacctggttgtcttagccgtcttcactttctctgtggctctcagtaacatcttcagaagctgcagctgccaaaaaacaatggcttagccatgacatccaaggaaatcatcaaggcatcatccacccctatagatgcccacaggtggccataggggtggtgttgttgtctgtggatagcactaatgccacttctgatgcccacaaatagctgcccctgaggccccaaggccccatgccctgcctgttaatgatgccattactgctgcaactcttcccaataccttgtttaggtaccatctcccactgcggaggctgcaggcagcacagcacccaagactgcactttgcactagccaggtgctacccatgacttctggaaaacggcccttttttgtttcatttttttttttttttttttttttattgatcattcttgggtgtttctcgaagagggggatttggcagggtcataggacaatagtggagggaaggtcagcagataaacaagtgaacaaagatctctggttttcctaggcagaggaccctggggccttccgcagtgtttgtgtccctgggtacttgagattagggagtggtgatgactcttaacgagcatgctgccttcaagcatctgtttaacaaagcacatcttgcaccgcccttaatccatttaaccctgagtggacacagcacatgtttcagagagcaccgggttgggggtaaggtcaaagatcaacagcatcccaaggcagaagaatttttcccagtacagaacaaaatggagtctcctatgtctacctctttccacacagacacagcaacaatctgatttctctatcttttccccacatttcccccttttctattcgacaaaaccgccatcgtcatcatggcccgttctcaatgagctgttgggtacacctcccagacggggtggcggctgggcagaggggctcctcacttcccagaaggggctggccgggtgggggctgacccccccacctccctcccggacagggcggctggccggtcgggggctggccccccacctccctcccggacggggcggctggccgggcgggggctggccccccacctccctcccggaaggggcggctgccggacggaggggctcctcacttctcagagagggcggcggggcagagacgctcctcacctcccagacggggtcggggccgggcagaggcgctcctcacatcccagacggggcggcggggcagaggcgctccccacatctcagacgatgggcggccaggcagagacgctcctcacttcctagacgggatggtggccgggaagaggtgctcctcacttcccagactgggcagccgggcagaggggctcctcacatcccagacgatgggcagccaggcagagacgctcctcacttcccagacggggtggcggctgggcagaggctgcaatctgggcactttgggaagccaaggcaggcggctgggaggtggaggttgtagctacccgagatcacgccactgcactccagcctgggcaacattgagcactgagtgaatgagactccgtctgcaatcccggcaactcgggaggccgaagctggcagatcactcccggttaggagctggagaccagcccggccaacaaagcgaaaccccgtctccaccaaaaaaatacgaaaaccagtcaggcgtggcggcgcgcgcctgcaatcgcaggcactcggcaggctgaggcagaagaatcaggcagggaggttgcagtgagcagagatggcggcagtacagtcccgcttcggctcgtcatcagagggagaccctggaaagagagggagagggagaccgtggggagaaggagggagagagagggagagggagagggagtcggagtcattttggttttattcatccatgcaattgcagctgctctcccatgggacataggacactcagggtgggggacgctgtgcggaatcaccctcagcacacccgctgatcctggctcattatctttgattcagaaaggtgcacttggcttcactctccccttggaatgcatcttcttcctggaggttccttggtttctcctgcatataacccacctgagtgctagagtgagcccagcctgaactcagggtggggaacctggtacattcctgactcgtcagtctgcccagctgctgggagaacttatgagcatcatcacctgtgtgaaaaagtcagggaatagattctgcctcatagattaaaagctaggttgataggttagcttgcttctggctcttctggccaattaagtgatcctggctttcccacaaacagaagtgacctctcgatttcaggtctcatcatgtgcactgggatagacaagcatatgtaccattgtgagttgccttgggtttgccaaaaaagtgccccttgagtgaaccaattattttcccttttccaaagtacagttttgtctgcaatcctttatttctaacactacttctgaatggaacatattgttatgcatggcagggatggggagcaaatgggaggaatttggagaaagagccgttttcctcccctaatggtgaaaagtattttttctaacaagcactgttctcggtagttgtagcctggagagccttatcctttccatcatcttcttgtctgcagcagccatgatataacaacgtttcccctgacgggagctcatgcaagccactgtgtcctggaagagagccaacctggtatgctggccagttggcaccacttgcctccatgcaagaagccagcactgtgccttgtccccagagatatcagccctgtaatgtccagctcgtgccaacaggaaccgtggaatacatattttcctttaaaaagagagatgagagttcctgttctttcccatgatttgtgcagtttatgtgatcatgagtttggattttcagagagagggtggggagggaaattatattttataggttatctatatggggtggtccagccccatattgctggatttgctgggtatattaaactatagccttcctcctctctgctcttaagccaatcagctcctagctttctctgctctaaaaccaaagtgggctgtttgtttttgtttcaatctttcattttgctcctatcgggcatctgttatatctctgagctgtggaccctatggaaaccttgatatgtctgcatgctccacctggtgctatgcctaggtcagtcagtgggaagtcagaccacgttgggcatgcagcatctcaaccacaggagtctggggtgcagttttaagtgtcactcttgttgctgacatttttctatccttctgcagggacgattattggaaatggtgtattgccctctgggaatatgggaagcatcagacaggaattctgggccatgctgcttttttttttttttttttttggagtacagtggtatgatctcagctcactgcaacctctgccccttttgctcaagcagtcctctcacctcagcctcctaagtagctgagatcacagatgcttgccaccacacctggccatttttttcttttttgtatttgtggtagagatggggtttcactatgttgcccaagctggtcttgaactcctgagctcaggtgatccacttgccttagcctcccaaagtgctgggattacaggcttgagccaccgcatctcgctccgtgctgcttattgtatacggttttctgttttttaccacctgtaactccacccattaaggcagtttgtgcagagtccctggcccttagtacggtgttcactgtggccaactgggtctagaccagtggttctagctctagttgcatgggaggatcttcctggggcttttaaattatactgatgcccatgctccatctcagaccagttacatcagacttcccaggtgggaccagggtggcctgggcctcaggaatttttaaagctccccaggtgcttttcatcttcagtgcatgttactgttcttcggtttatacaaattctttgacagatggacaactcatatgagagcatatgtgtgatttttcctgtcatgataatggacgactgactgactatggcaaaaggcctccattttatggtttgtttagttaatagaagtgatatatttatgctcatttatgctctcatctggtcccctttgacccattactcacttttttttttttttttttttttttggagatggagtctggctctgtcacccatgttggagtgcagtggcatgatctcgggtcactgcaacctctgcctcccaggttcaagcaattctcctgcctcagcctcccgagtagctgggattacaggcacacgctaccacgcctggctaattttttgtattttagtagtgatggggtttcaccgtgttgcccaggctggtcttgaactcctgagctcaggcaatccccccacctcagcctcccaaagtgctgggattacaggcatgagccaccatgcccagccgacccattactcacttttgcgaaatagctggctgaggttaaagatgtcatccttggagaatagaactgaatgcgggtccacattgggccaagaccttctgtcttatgctcattagtacagtcctctaaaacagtggctgaaccttcacattgaaaatgtaatcctctcaaaaccctgatcaagaaataacatctctttttaagtatgaccttgatacagcaaagaacaagagtgcctcagaagagtgactacaagagccagaacaagattgaatagaatcagaattgacgttcctaagctaactttaaaagtgaaaaaaaaaaaaaattaagaaagacatgtgagaggttaaaccccaaacctgacagtgtacttttaaaatgtcctgcagaacctggcagtcttcctcagcaccctggtttttgccccagcatcctagcaaagtcacctttctttctaaaccactagttgaagggccaagtctcaaaataagaagatgctactatgcatagctacttggacttgatttagaacatgatgccagcaaagatggatacaggtaccctgactccagctttcttgatttgggtgaagcaattacaaaggagagttcatgctaaaaataggaagttgttattcaaccattctatgaaggcagaaaagaaaatctaataaatttgaccttcagtgagctgcaatttcaactctaacagggcttcgtgggcttgataatattgttagctttatttgttccagaatgtgtaaggccagcaaaggccagccttggaattgtgtcttattatctctccttatgcccagttgcctgtgtcctccccacctccatcccagggtatgtctgcattatcacttttgcacataaacctaaagattaaagacggtgtttgttttgaaggaggataggaagatcaaggataaagagaaaacatgtttgtatgtatatgcatataacattcacacagcattctaacagccaatctctaagtatcatcagtaacaggaaaattcttttaagtgataatcttataaactgattacaggtcactgctcacatgaatgtgtgcctgaggctacatccctaatgtgaagcaaagtataagatacaagaaacctaagcatacaccttttcatccatgggcaaataattgccgaacatcttgcttaacacacataattcgccttatgaatagaaacgtaaaacggaaacctggttctggtttgacaatttgacaaaccagaatttgacaataagcactagggggaagagcactgatttgggatttggtctgataagggtgtatatcccagctctgctgtttacaggcgaggcagccttggccttgagacataaactcactaagactcagtttccacatctagttgtaaggtctgaaagatctactgtgtgcacagtagctgaccattatgtaagggctccatagatagttacgtttatgatgagctgtggcttttgctgatattttggttttcaaccagatctatcacatgaaaaaaaaaattccatgtttttaaaaaattagggggaatcttccgaagatattatggattaagttttaattcaatcctttaggaaaggtgagtttgcttgaagacttagcagattttatgcataggagatttgcctgctcactggactggtgggtaatgcaaagatcaacaattatcttcctaaaatgtctgcttttaaaaactatttcttggtaacaacagcagtgctagtcaccagtttccggtttgcacgtcttttcttttcaagggcaaacatttaaaacccttccttacctccaggatctttgaagagatgaaaaagatagatcagtgaggagagggaggtcttgggttgctaatgctaacatgtggaatgactcataattgcgtaaaaaagtgagatcaaaaattccttgtcttgagatctaaaagttttcttagaatacaaagtgagcactcaccaaggaactaaaaataaagtacactggagatcttccaagaacacctctgggtgaaagcatcatagaaactggctgctgtgtccagacagggaactcagcccgaggctgtctcattgggagggcccactgttgaccatggcactggtagactttcctccaagtatcttaggccccttcacccggttctgtagaacaatgacattgggacaagccagatttggccctggggtcctaatagctaaatggaatcgcgagacgccaacacattaaagagcttggagttgagcaaagactggcacagttgtatcattttgaagctttaacaaccatttcatccaacccttccacttcaaggacaaggaacctgaagtccaaggaagtgaaaccacactcaatttagtgccttttagacccagcttgaattaaccagaggttgaactgcaactgacaaggcttttccatcccagggttggtatatgtaatagcttatcaccatgccataaaaattatgaagtgtttggtgtctccaagcttaggttcacaaagttggctcatttgattttgtctaatgagtataacttgtttttctatacaataccacttctttcttgcaggtctgctatcacataggagaaaaatcatggccatttgccttggtcaacatttgttttccttttcttccactgactaaaatattatgattatttatttatttatttagagacagagtctcactctgctgccaggctggagtgcggtggtgcgatcttggctcactgcaagctttgcctcccgagttcaaacaattcccctgcctcagcctcccgagtagctgggactacaggcacgcgccaccatgcccggctaatttttttgtattttagtagagacagggtttcaccatgttggccaggatggtctcaatcttctgacctcgtgatccacctgcctcggactcccaaactgctgggattacaggctgactacaatattatttacatacaatgtaatccagttataagcatacagttagatgaattttggttattgtttacaaccataaccaccatctgaaacaatacatagaacagttccctcacctaaaatgttccctcgggcctcttggctctcaatcccgtccccctgcaacctggcctctggcttccacagatcagctttctgtctctgtattttgccttttctagagttttatctaaatacaataatataatacatattcttttttgttcaacatctttcacctagcggatgtttttgagattcatccatgttgttgtattataatttctttttattactggaatagtattccatcgtatggacgtacagtttgtttattccttaccaattgatggcctttggggttgtttctggtttggggctattagaaatcatcttagccaacaattttatctttaatttctttcagtgatctaatcttgtgacccagcctctaatttttaggatcttagaatgttcaccatcactattagagtgaaacattttcaaaaaatgctgatagggttggaggtgttggcccctgatcctcccatgtgtgactttggaagtgatcttctactcatcttgaagtagcaatgccaaggctcaaagctgacatgatggcctatttagtgttctgtaatgtaatttaccaccaggataggccttcgggcacatgacagagtgcaacaaaatgcagtatccaatatttatagtaaatacactggagtggttttttatcttgccttgtagaaatgtgcacacacactgcttttcagccattctaagtgcaagaggagggaaaagagggaagtccagtgaacggcactgtcccgtgcataaacattgcaggggtacagggctagcacagccgacttggaacaacccgggaagagttagctctcagacttaacaggagaaactctcctgaaaaatgtgctgtccccctgttataattcaccataatgagcggggaacaaaaggttgtgaaggggagtggtgactgatggccgacacggccgccctgtgctgaggctggcacggctccctctggcgaaaggcataatatattattgctccaggtcgcatagtggtaaatgaacacttaaggccgctatggcaactggattgattatcacaggtacctcaggaccagcctggcccagagttgcaagtgagcacgtgcgtccctgctgtgctccagtcagaagaacacctcaaaggcaatttgtacaaaatgaagcctctgatgactgcatgcccctcctctccagccccctttgtccagtagagaatctggacaaggctggcccagacagttggacctctcagacctgagaggcagggctaccatgctgaaagaatgcctggttcatggtgggaacaaggtcgcagtttgttgtatataatacaatgaatggaatgaatgaatgagtgagtgaatgagtgagtgaatccatgattggaatgacaagaagtctccgagggagcactaaggccaaagtggaggtcaggagctgcgatgccgagggaagaggtctgagagaggaagatggctacaggacgtagcaagttgaaatggaccaacgagcaatggcctgagcaaataactttgatcgagccatcactggtgacaggacttgaacacatttctggaagcatgttgcatgaataagcctgatttgtttaagaagccgggcatgggccagtgcctttttatttaattcacagatattactcggagtttacacacaaatctccagttttttcagtagccgaaagaaaagaagcaatctgtatccccagtggcagatctaggcagatttgtattaatgttctaaatgcaccaattatcatttttatttttcccagtattaaaaaaaattttttttagatgaggtctcactgtgctgactaggctggtgtcagactcctggcctcaagcaaaccttcttgcctccctcttatttaaaatgtttaagtgagtgtttccctcctctagtttgtatgaactgatctaaccatgtacctgtatccagggtgtagagtgagtagcattaatgccacattaccttctaattttgattggcagaagttttacactttagaatttaaatgtgaaggtatttgaattctttgcacacgacctctaagctagatcatctacagtggcaactaaactggccaccaccttcacaggtactatatttgaatacagcatgcaaccttccactgcagaaacttaattgtcatggtaacaatgatcatctttattaattatgggaaatggaatgatagggtgaagatagaccagtatttctcaaatttttcttcattattgcctcctacagacctgttttagacattgttttttctaatcactctccccatgagattgtaataccacagatacaaatacactatgtgtctgtttatgtacgatgtgtatatctgtactttatatataaaaacagcaactttttggccctcaaaaatcaattttcactccctttagggcaacattagcttgtgtacacaagctggaaaaacctatcttgaacctaaaaacctaggttcaaattctacttctgctaattttcgttctctgagtctctccttcctcttcctcaccagcaattgcagataatatgatccacctcatgaggttcctggcacatcataagcaaaaaaagaaaagaaatattagctattatcactgatattgtgctctgtattaacctgtgttttcacatatagaatcttcattggtcctaactgcgagcctctgaggtaggcaagtttatgtaacattatcacaaatatcagcatccccatttgactgataatatttcagatggccagagtggctgggtgatttgctcaaggtcacacaaactgtaacagtagttggagctgaaacgtgaaccaggtgttctggttcagaactccctccactgcaccttactgtctttggtggtagcagacactactgggaagacccaagttggagtctgggaaactggtggaatcacccatgagaatgagctctaaggaccaatcatacatttttctgcccccagtgcatatgaaacagaattgtgcaggctttgaactgaatgatctcacccagtttcaggaaatctgtgataatattttcctgtgctgtttggtaactcttggcataatgaggcaggattttcccaaggttggaagaccttggctttccaactagaagatggtgagtgctttctcaccaagacaaaagccttatgaaatgagccagaataatcacccagacagtaaatactcttaaacaacaaccatactcaagctcagtgctatctagaagaattcagagagtgcctacactggtcctaaagttctcactgagctccatgaaagtttctgtgtcagagggggcaggttgagttttggtgtcagacttttgggttctaactttggctttgccacttgccagctgtatgcctcggtttcctcatccattgaatgggttgataataatgatatattcctcataaaattgtgaggatgaaatgagataatccaacatagagcactccatatggtgcctagcacacattaagtaaatgtttgcagttgttatcattggattaaaaaaaaatataagacctataccctttccttcacagagcataagatgtaatactcctcttatctaatgaccatcccttacatcagcacagtgctttatccttcttgaagtggtttgatttgaatggttttacagacagtcctcaacgactggacatttctactattttctcctctgcccctaacaaaatgtctgtcttacacatttcatcaataataactgctagtttttctaactagctaagaggtacttaattctcagcacacaggaaaagatgaagtattgagcagaagggcttgtttcttgactgctgccactgtatggtcacaggcagtgcccgtcactctggcagaaccatccttgctggtgactgcacacagttgctctcaggggtggatagagcactgtgatccccgtttgggggctaggtgatggtgacggtgatggagaggatgccgaggcaaacattttcacttctgtagctactgtggacaaagaaggtggacacttttgagcagaggctgaaggtgtgacaggtgtgcaagggtgccctctgtttctccatccaggctgtttctggaaacgtgccctgtgctgctaattacaccagctctctccatcagagccacttcacaggttgcctagcacaaggctaagctgaaaactaggtaaaagcatcctactttgttcaatctaagagatggctgctgtgagtagatagacagaagactgtaaggagcaaggcaagtcattttgttcctggagatgggtcttccttttactaagaagggcttcccccagggccatagatacctctgggccatcagataggattgggtcctagcatcattgtttttctgctggaactttgcacagggactctgatggtttcgttactatgcagaccttcccatgggtaatattaccatgatgagccttcaggctgagtaactgtagggccggccacatggggaaacccttgacttcaactggtgatgaattcaacaatgtcagtctcagtttgcccaactcaaagagatttgggctcaaacttattttgggatcattgtcttctgtctgcagtaaacaagaatgttctctaaaaagggcaaagctaacttttgggaagatacacgtcttaggaatgacttgtctgctgcggtctcaaagggtcacattttgctgatcatttgtgcagcatctggctgttgaagtccacctcctccaaagcaatgaaggatgaagctgccaatttgagtctgatgttttatttatctggactggtaactttatgtatggtgtgtttctctgtttgggcctcaaggccggttaagcaaaaggcgggaaacataaataagtaatggatggagagggctgtccatttatagactctcgacaatgacctgattttctgttccagtgtaagcattagtgttgcattagagtaatatgtagccatagatgttttcactggtgtatttggtggtgataatcaggagagacatattcatgttctatttttataataaaaattaagaaacctcaggccacaccaagggcccttactggcagcatggacactgtgggtttgaacagtccattttcctcagcttgtgtgggatcactgtgttcttttctgctctcctccagtttctggttattattaaacaaccctttgtgaaggattaactctggcttttctcccagcgaggagatgtctacacaaagccagaatatccagccaattacaggcaaatgggttatttggtgtagtgcaggaacaaatgactggttggcaagccaattcttcactttttgatggtttcctttggcatggaaatagtcctctgtagtacacagtgtaaatgcttgtgagcatctttttattcattcattcagaaaatatttcctgagggccccctgtgggattcattatttctaaaatggggataataatagtacctactgcatagaattatgtggattaaatgagcttataatgtgtagaggttttagaacagtgcttggcacacagttaacggcttagacaacataagcttggctgtggagtttgtattttataggcaaggaacaggcagtgcagccaatggcataggtggatgtgtgctttagaaaggtgctttctgtgggaaagtagaggacagattgtaatggagcagagcctggaggcagggagacagtcatacctcttgtccagccagtgatggcttgagggctttcatttgcctttctttggagtagccaatacagtggttctcaaagtgtggctcccagacaggcaacatcagcatcacctggaaatttgttagaaatgcaaattcttgagccagtgtgatgactcattgactcatacctgtaatcccagcaactcaggaggctgaagcaagaggactgcttgaggccagtagttcaagaccagaccagcctgggtcacatagtgagacctcatatcagaaaaaaacaaacaaacaaacaacaacaacaacaacaacaacaacaacaaactcttgggccttatcccagagctactaagtcaaatactctggagttatggcccagcaatctgtgtttttgtttttttttctttttacaagccctccagaggactctgacccttgctaaagtttgagaatactggtctagtctcttgaaggaaagtggaaaagagaactttagcaatgtcttcctttctgctcccccatttggcctccactgggccagcatagggcaggtgccaagctttgggaaaggtctccctgcatgaggcaggcagcagtctccttgttagctagtcacacggaagcaggagacttgttaatgtagatcaggactgcctgttgagcacagcaaaaccaaacctcaaatctcctcctggcttactgccaagagggcactgtgacccacccctattgatgcatatggtgtggagctggagctggggctatgctaagtaggtgtttctttaccgaacgactgtcagctgcaagactccaatgcgcttctcatcactttgagaaatgagggagcccagcctctctgggcccttcaaaagcagatgttgcatctggtttgtgggagtctgtgtgcacacacccaaagacatttcatggccaacagaatggatcgcaccagtgcctctgctttttcccatatgaaaagcttgtgtctgggctggtttttattactgatgtgcagccacctctggtatgaaataccacagctgtagataattttagaacatccatctagattttctaaattcattcatttgttcattagtacagatgtgtataccctggcatgatgggaaattgaaaggggaataagacatcctcccccacccctcttcctttaggagtatgccatccaggaggagagagaagtcatccacacaaatgcctgcgattcagaataatgcgttctatgtcaataggaaggtaccaacaaactgtgatgtgagagatcaagggggcttcacaagagaagagctgcggaagctgcttggaggaggaggtcgcatttgatctgagcctggaagcgtaggcaaaatttccagaggcaaggagagggcatctcaagaaaagggcactgcaagggcacagggaatgggaaatgcacagtacatttagggagagtgagtggtccaatttgctgagaacgtaggctacagggagaataatagaggaagctgaggcttaaaagatagattgggatttgaataccaggctaagaagtctggacatgattccataggcagtgggagccagtggagaatttgggttggaagattagtatgatcatcatggcactagaggacaattgggctgatgatgaaattgggatgggtaatacttgaggcccacagtaggagacttgctcagggtcacagccctgggaagcagcagaatcaatactagaactaagcattctgtgtctgcaagttcatgactgtggggggcaacctggaaactcctgggtaaggaagaggagtaagtttttaagtgaaaggttgtctgacgtaggaagccatcaacactcttcagggattgagggggcaagagagagccaggccactgagagaattcagctgcttttctgttccacactccttggttccttatcagaaagagcattcatccctttgcagacaaacaccagaggtcctcagtgtcacatgccagccaagctcagagcatctcaacaatgccagggagtcttggcatggggctgggccatgggcttggttctgactcagagaagtcggaaccacctactgagtcatttgcaggagctgtggtttcctgggaggtttcccaaccagttacccaccccgccaaatcgctggtagcttgcaagatctgaaggagccgcaattcacagtgccagggcttcaggcaaactcaagctgcatatctcgagctgttgcacagaaattatttccttgcactacatggagaaacttggcccttggtagtaacacgtaaacaaatgaaactttttaacatacctgttacttatttgatcttagggagatctcagtttccttacctatgaatgagctactatgagtaagcagctgtgatatctgaaggaattaatggtttttaatggtttctctttaggacggtccagaatgacccagccctaatcgtggctgagtttacaagacactgccttggaatctggtccaaggcagctgctcatggcatctccatttcttctttgagaagctttactgcttctcaagcaaccccaccttctcaggtccctcagattttcccctcattagtaatcttggacatttcaaataccatgaattctttctactccaaaggattggttttcaaggtgaattcaaagacattgatactgcttgttattccaaatagaagttgcccatctccctccagtataggatcttcatttaaaaaaaaaaactcttgattcaatatttttctagatattgctttgagaattcaggattagaattggtaccataatcaattctagaccctaatttctggcatttcattatgtttagctgcagtgccaagttgaggcaatggcttaacatggctccctgacatggtgttaatattgaaggaatcaatatttagctggagaaatgaatatttagctggagaactcagccaactgttttgagtctgagctatcagcctcataaggcagaagagcttagggagaaggctgaggtttttgccagaccatgtcccatctcttcctgcccttacatttgcttatgaggtcctcacagtggctggtggcctataagggggcccttctgtagaactctgtgtgtgccagaagaggcagctttggccctgtgcaagacactctggagcattaagtcttggcatcagccatgcaactcttgataccagtgcctgttttctagaggcaaaataaggacacttcatgagaagaaaggagtaatcaaatgtcggagacttgaaagactgcaggagtctgggagattggcagggcttagctctggaagctgaagccaggcctcttctctcttcagctattcctcctgcagctatgagttgggattctgcttccccatggagccagaggagtgagtaaggaagagtgcttgggcagggaggggctgttcgtgggtggcagggcatccagtggaggcctgtaggctgcccttcacttctgggacaggggctttgtgcctctgggcagtgaacagcctacctcccaatgtgcctccgtgcctcctactcctgtaagcctgcctggccccacttatggacctggagcctatctgctgctctaggcagactcaccttctctttcccaggtggaattttctcacagacagggagttcttccccagaccctggaccagtcactcttccatgtggtcttccccctcttccccctgccatttaaaatacacatttaaggggtaagtccctctcataacactgtagaaagggaacacctacacccttttaccctcagagaacagaccactttctgtttttcaagggccacttttatccttaagcaagacgtaagaggcctcatataggcagatgtgaggccatttcattttagaacatactggttttgccccaccagggtcggtctcttggctcagagataaatgattgggaatctctgctcacggacctcaaagtctacaggtgagcagatgagcaggtgatgacagtcaccacatacaaagtgtaaccacagaggtgggtcccatctcaacagggcagacagtgggaaacctaccttggacacttcaaggaaggaattcagaagtctaacttccttcagtgaattgggcataatgagctacaaggctgttgcattaattccaaagtgggaagggaatggctggtgtccggaagtgttcacatctgctaggggaggctgaggactcctggcactttgcatctataggtgttttctacagcttcatagtgggccacctggtgttgggtcacttgtatatttgtcttccctccctgtattgggagaccatatgtaattctcaaagatgcctcccaccgtcccacatggaaggcacttaagaaattggatctttctgtctctcggcttatatagaccttgagaatggaggtgggaggatatgctcctccctcttcctgtttagaaatgactaaatagggcacactccagggacttggagtatttcttagctggaaaatagggtagagtaggaggagactggcatatcaggtcttatgttgagctttttcgtctgtatctactatgcagaatgatgggctagagctctaccatctaaaatggtagccgctagccacatggctatataaatttcaataaattaaaattaaatactattaagaaattccattcctctctcacactagccaaatttcaagggcccaacagccacaagagactagtggctgcagtattaagtaacacaaatagagagcatttccatcattgcagaaagttcagaggcatgcaccagagactctaagcagcacgtgttgatccaaaatgtgctccataaaccatatgcgtctgaaggcaagaacagaggcgagcttgtcaaaatacacattcctgggctcctccctagacttcccaggtccgtatctctgggggctggaggggaggcctgggaatcagtattttagcaagcactcccagatggctattatgcaaactcacacttcaggatgagcactccaagggaagccagaagttgaagagcgaagcgggaaaacctcctgatatggcgattctgggcatatcagatgtcttgtagcactttctactccactgtaagatttcccaaccaaacattttcaagagaatgcgactggagcctccagactgacagctaagtgcgcatctcagtaaagtcctggctgttcttccatcaagtagtaaaaactgaagaaagtggctgtcctagcattatctccttctcgccttttgcagaaccaggaggatggaaataacctcgttgctccccttgagtgtgtttgaatcacaagtaccttccctctaacataaatttatttcccgctgccttcctctcaacaaagaccagccagtgatgaataccagacttcatagcttatttgtcaaagcagcacacctgtgaggattcctgtgaaagataaattttgatagggggagggagggctggaggaggagggacctggccaggaataaatcttaacatgttgcaccagactgtgaatgagcgcttgcctcacaaagcttgccgtcttgacaaggtatgataaattaccctctttgttgacaccttcattgggttatttatggctcattaattgaaccaaaaaggggccttgtagacccagcaggggcaccatacaatgctcctccaatggacccagctcaaagaaaagaacaaaggagggaagagtgggagcggggcacacaagtgtgtctgctccttggcttgagacactcttcaccaaacaattcaagattaaaaaaagaagaagaagaaagaaagaaaagaaaaaaaccctttggaagctcaggtaaacctctctggggatgattagctgtacacctggtgccccagcctgtatgctgtctggcaccttccagaggagcctgtgcctagagctctgtgcattattgccagcattactttagacttgcctggagagtcagcatggcacagtggaaaccatcagaagctcccagcacagtcctaactctcccatgaacatgctgtgggactttagggcggtcactttgtctctctgagcttcagatgccttccttgtgaaatgagggagtcgaattggacaaactcagagtctttttcagttctaaggggtataagaaaacgaaaaacagcttttcttttcactgcccattgtattagtttaacctctccacttctgattattacttagtctattcatttggcaagtagtgtttactgaggtcctaccatgtattaggttccaaggggaaggcaggcatactgagcgcgaatgcttttgttgttggcttccacgagcttcccgcctagaatgttggttgtgttttcaggagctgattagcacttcctgttttagttaatccttaaattaagtagttacaggatagtcccttggaagaaaccctcatttacttgacaataaaggaacatgaagtatttccagctgttgtgtgtgaaagattatttcttcagggtgccactgtggtccatgaatatgttgcaaaaggctcatgtgagatgcaggggagtctgaattttgtcctggagtctatgaggaacatttaaagggatttattcagggaaaagatatgggcagggcagttcagtgttccagagagattctctagtgccagggaatgtgacctggagaagatgggaggatgggaggaaaatcttgcttgatgactgttgcagtagtccaaacaagagaaagcacgggccccaaacaagggcatggctgtgaggaaggtgaggagaaaacagggctggaagactgtggttctaatccagacactgtcaatagccaacttgaattattttctccagaatgagtatcctgctctataaaatgagaacatcggactgaatggtctcaaaatctgacgcttgcattctgcagggattaggtttttcagtgttttttgtttgtttgtttgtttgttttgagacagagtcttcctctgtcacccaggctggagtgcagtggtgtgatcttggctcattgcaacctccacctctcaggttcaagtgattctcatgcctcagccttcccagtagctgggattacagatgtgcaccaccacacccagctaattttttgtatttttagtagagatggggtttcaccatgttggctaggctggacttgaactcctgacctcaagtgatccacccacctctacctcccaaagtgctgggactacaggcatgagccaccacagtcagacggttttcaggtttttatgttcccctgtagttagaagtaggaaggaagaggaagctgcaaagactatattcgaaattgaaagaagtgttatttaataatggttggaatgttcatcagctacttactgccaagtatatggctgggtcctgggaagtgaacattacagatgacagtaggacacatcctttgcctccattccatatcgcataggatagagcttccttaggactctcactttgtagaatccccattttgcttcacgtattggttacctggcagctagtagggaactggtccacatgtgttgagcacttcctatctggtcagagaggtgggaaggatgtgtgtgactagcgtgcacctgcttagaaattcatttcaactgtttggagagatctccactctttttcccttccaaggcttccaataaaattattttttatttcaaaatgataataattttttcctgatatcaacaacacacttatcatgaagtgttccaactgtaaagaaaaataggaagcacagaggaaaatttaccccaaatctcaagagccaggtagtaaattaaaacttccatgaggatccttccagtcatctctctctgtacagtctatctggatgtacttacatacatggattaattacatcatatagacagttttatttagtcaatgatatagtagcttgtggacatcttttgtgatatttttatgcgtcatgtttatgatgcgggatatttcattcatcagtaaatcataatgtattcagctgatatgtagtaatagacatttagtttgttcccagcttttctcttataaacgagactaaggagcatccatgtgcatatatatttgtgcatttctcaaatgatctcctagaaatgaagctgcagaggcaaagtatatgcacattttaaagtttgcagcatattatagccaaataccctctctgagaagatgtaccactgtgcttaaaatgtcattcgatgttctgtttcactgggaagtcaatgcacccaaggttggggttgagcaagatgggggctgggataactctataatctacccagtgactcggtctccaagtactgctgagtccatgggcctgttggggagtgtgagactttggcaagggcttatggaaagctgtagacagccaggtgtcagctgatgccaggtcagatagggtgccttccaggttctgctgcaggtgccttccaggttatgctccaggttctgttccaaatgtcattggattgagggacttttggctttcgaatagctgtgtgtcactatatgcacaagcttataagaaatgcagatatggagatgcctccaaaaccatagatgtatacctgtcatgaatgttaccatctccaggccctgatgcaatcttttctggcccctcatatagcagccttgtatcctagttgttcaagagcagttctcattcaatctactctatcctcccaccttcaggggtgcctccaatcatgtcagaccatgcaggccagatatggcctcagcatttttggtcaccatgtgatgtgttaagagtttaattcccaccaaccgttgtgtttccactcatcgtaagcacagaatttccacccatttattcatcacccattccttcaacagatacttcaaagtacctgcattattacaggcactgtcctgagtaccagcagaacacaaaaatggacagaaacgtacaggttcgtggcatctgggcaggaaggaattctgatagtccttggattccacaccctcatgcttccagtgaagaaacggaagcccagaaaggcaaagtgctcagccgccaatggccggtctgatgatcattcactgtatcaggcatgcagtgcatttctgagtgagctgtggggctgctgggccaaagctccatgacagccccgctggggattccctgactcccctctgaggacagccagtccacaggggcgagagtctttacaactgggcctacagacaatgtattgttagtactgtgggatcagacaggtggaggagaaacagagtagggctctgtggccccaaacaatatgtgtaactcaacatctcttggctggtcttactggtccagcctgtctcctttcagtttgaatatggggacatttcaaatattctcttcgaagccaatcccatttagagaagatagatagtctgaaggtgacaacttctgagctgggagaggttccagcaccaagaaactgacaactttcaaaaaatgccattgagagagcagtctacacctgtggctgcagcaagggtccgcctgtcaggatgtgataaggaggcacttcctcaattgttagagtacctttattttattttattttattttattttattttattttattttattttattaatttatttatttttgagacagaagcttgctctgtcacccaggctggaatgcagtgacccaatctcagctcactgcaacctctgcctcctgggttcaagggattctcttgcttcagcctcccaagtagctggaactacaggcatgtgccaccacgcacagctaatttttgtatttttagtagagatggggtttcaccacgttggccaggctggtctcgaactcctgacctcaagtgatcttcccacctcggcctcccaaagtgctgggattacaggcatgagccactgtgcctggcctgattacctttaaatccttggaaatggtaatgtgtcctatcaataatcactcctcatatctctatggttgttatagttcacagtatttccaccacatggcctggctgcctccacgcaccgccctgtggtttagtgcttcacgacttaattttcctgtgtattcgtgctttactgattaatgaggaatctgaggatagaaagggccagtgacttatccaaggacaagaatttctattccattacagatacaatagaattacattaaatcggatgagcagaagtatgattacaggcacgtaagaaatatattcacttataaatatatgaaaagatctagaaggctctaaaattttaaaggactatagtatgtgtaactttagttttcttctttgttcaaatctgtttctatatttttagactataagcgtatattagcggcagtgatacaataagaacatttcttaaaagtagaagagtactcctctcagttgtgtgcttagttttaaatgagtgaaaaagtactgaataaatgtaactcaaccccttccttccgttctcccagcacctatattggtcacatcttctgcctcagaaaagttgtcagctaacaccttcaggagataagttgtcaacaagctgaaagtcagagttcttttcttgaatggaatgctacacatggggtatgggatagagggcaggagagaggagagcaagtgccaaggtgagtttcacccacttgggaagttttcagtgggctggccctttctggacccacctctgccagtgctcaccccttaaaacacactgccccgtgctcacacatgatcatggtcagtcatcgtagctctgcccacagcagggccaggcatggactaagggggaaagagaaggcttctgagcccttgcccactccagcttccagcacaacttagcagaaccacagctagcacatggcaagccctatggtgagttagaggggagggttttttcctggctcttctgggtggggttgttgccactgtgatctgtagtgggaacataaatgacacagaaggtatggggcaacgggaaaaacaaagttttgttgctgtggagcgttcggaaaggcctcagtaatttgtttagcaattagtctttagatataagtcactaggtggatcaacacagcaaagcagtaagtaagcacattttaggattatgtgccttttttaaaaagacttgggagagaccctagaaatcatcggaagcccacggaagttggtgccttgactcaagtgactctgagtgtcaggggcctagatgacctcaggtctccagcttcccgtccagtgctttcgtcacagcctcttttcactctcatctgttcatttatcccacatacatttgtttgagggcccactatgtgccaggtgctgtgctgggatgtggaatacacagatgaataaaatgaaggccctttgttcgggagtggggggactcatgatctccttagaggaagcagaagcattagctggttgtttaataaaacgtggtaagaacttctagatgcatgcaatccaggagacaatctgtttttttaaggaatcagcacaaggtaaaatactgcttaggcatgtgatccggcctttgttcagacttcagaggacggcatcctgtgtgcaagatgaaaacgacagcttctttgggcagtgctgaaagagcagagagaaaagatacaaagtgcaaaaagtgggtcctgtctgctttactttcaccttaatttgggcggtatgtttatttgaggatcttaaaatgcttctttcatacacacagtgacaccagatatcacaccttgtctgtcttcccggaaataccccttacagaatctcttctgcatatatgtgtgacaatagtatctgctctgccatttgtattcacagtcttgtgttaaagggtctttcctttatagtattagatgtagttttgacagtgacagcaaccatccatggttctaaagaattcagaagagtgttacagacagaaactctgggtgtttttaggaagcttcatgacaatacccttttttctctcctcacaaagtattatgtgattggtggccaaagtcataaacagctttcctatctattgactctgtgatttgttaagacattgaattaattaagaatgaagaaatgcatactaagtataccttgtttggatcttgatttgagcaaaacagttgtgaaaatatatttatgagttaggaaaactggacaagaaataggatagtagcagtagtctttaatgatcatggatgtgagtatcttcttaaagagactttatttttagagcagtttgaggttcacagaaagattgaacagaaattacaaagagcttccacataccccttccccccactctcccactatgaatatcccccaccagagtggcacatttgttataatcaatgaaccaacatcattatcacccaaattgcatagtttatgttagggttcactcttggtgttgtgccttctacaggtttggacaaatttataaacacatgtatctaccatgatagtattatacagaacagtttcactgccctcaaaatcctctgtgctccacctattcacccttccctcccccaagccccaacaaccactgatctttttaaattatgttttctaaaagagttatttctcagagatgcaaactgatgtatatatgcaaaaacaagcatatatctgtagactgtgcatatattttttaacggttggggagacagatgcagataaaacaaaattggccataggctgataattattgaagctcagtgacggggtccatgggggtctgttatagtattctctttagttttgtgtatattcaatattgtccatcacatttttaaaattttaaaaatgaatgaccatatattgagcacctaccatgtgtgaggttcagtgctaggtgttttatacacagcttcttattagatcctcacagcagccctgttagtgaactgtattatgctggtttcgcagatgaggaagatgtagcgtaaaggtaaagtgaattccaaaagccacatggtgagtggcagagatgggaattgaaccctgttttttctttaattgtattggagcataacacatacaaagaaatgtgcacagatcatatttgtgcagctcaatgaatttgtaggtgaacacatcgcctatacccacataaagaaatggaataggatcagcatctccaaaaccacctcatgaccttgccagtcactacccttcctcagaggtaaccactgtcttgacttctagcaccttagatgacttttgcatatattttgaacctcatttaaattgaatcatgtgctatgtactcttttatggacggcttcttctgcctaacattctgtgcatagaatttgtccatgttgatgcctgcaatgggtctttccttttcattgctatgtagtgttccacggtagaaatgtgccatgattgatccattctgttagggatggaattagtggtatttccattttggggtttttatgaatagtggctctgtgaatattcttatacatgtcctcaggtggatataagtatggatttctgttggatatatcctggcagtggaattgcaggggcatggggtaggcatatgtgaaccaggagctccagttttctttctatcacccatttgtctctacaaataggttaagaaattaaccactttatgtgattagttctataagactggagaataacacagggtcttaggaggctatgaggtagaaccaagactgcaatttaggccttgatattctggtcctgggttgatcatgagccccaaggcccaatccagaccttcaaggcttcataaatcttccttgaagtgagtttaatgcaagaaaagaactccactgaggtgtcctgcatctgtagttttacacaatagcatgtcatttcaggacaccaaaagtcatctcacagagagaaacatgaacataattgtttaaactatcagcaaatggaaaaatgttatgaagatttcaataaaattcatcttcacatttggtgtacctgaagatttgtcaatattatagcaatggtctcatcacagtttcatctttgaggatgaacaatatctattgtaatagctcgctgttaactatgaacccatggtatgtaggcttctccctggggtatgtggtaatccacatctgtcatatcttagtgcccagcctgttgttcctagcacccagtttgggtactggtaaagcttggtgactttaggcctaagagagacctaaaatgggtggcctactgacagttccaggtgacagccatggtctgaggatgtgggtgatatgataggaaaaaatgtgggcttcacatacaaatgggcataggttcaaatcccagatctacttattctttgacgttgaaaacattacttaattctgagtctgcttctttaagacaaagatgatgagattagccttagagaaatattagagaaaggttaacttagatgatagaggtggaagataaaatggctgattcgtagatagaaacatagatacttagatatatagatagatacatagatagatgcatacataattccaaggtctccggaagctttcttttctgcctccaagtcctttggatgtttggttagtggggtgagatagtgctgctgaagctgtgagggagctgataaaggaagaggcctcttctctttcctattcctttccactaaaactgagccttcttccccttctccttcgtatgcagttagcacagtggagtgtgtgatccttcctggctcttctgtacgttctataagattttatttcctgcatggttgaacaccaagcatgaagattattatttgtttatttgttattgattagttgacagccctacctgcatccagaaattttatactaaaaacataggtacaaaaagatcaaaacaatatataaaacaaaagcagatatcaggcaaaagagaggaaaagaaaaccgtaatgaaaactcctacctaaggaaaagatggatttttcagcttcctagcagctagaggaaaagggaatcagtgtggacttcagatttctcattatctattagtaggggggcattgcaggtcaggaggtgcaaatgtctgcctgctcttgaccagtgaaaggaatgtgatacaggagtctttgtataggtgccgtaatcaggtaaaaaatatgtatttaaatatcccagagtagcctctataatggatgcagaggcactccctatataggtattatctatagtagcctagtctcaattttgaggcatcaacaactcctccctcatgaaggaattgcattatggaaaatcactcggaggtggcctgtgtgggctccaggcctggctctgccatttatctgctttgtgacattggaccataccttccttcacccctgctgggccctgggcttctcctctattaaacgaggggtctcctgcagttctaagagctaaagtttctcttattcttcatatgccaggcaccccgttgtgtgggtttctcctccccatgcccagtgatatccagtgagaatcaatagcaagagcaacctcagaggatagtcaactcaaggggatgtggaggaaaagccaaggaggccactgttgccaagaaatacagtctggagaccagttttgtatttgggggcagggtggttcatgcctagtgcatattatataagccgcatgtcttttcgtagcatcataagtagatggaacctaccacctcctctgcttctgccttccttatattctcttggtccccacagagcagaggacaggcagtcattcagtctcctgggtttcgtaccccttagctcaagcacgggctttctgagcttccttactctctgcctaacaagttggtaattcctggctgtaccctggctcaacagacctgaagactagcctggtacagctcagggcctgcaccctttgctcaagctcacacatctctttctgctccctccctgtcaccaaggcaccccagacatgcccagaaacaggacaaacctgcacaactacattcttcacctgccagaagaagaaaaaaaatatttctgatatctccaaggttcctgcttttctgtcaattgggaatgaaaagataaagtccctttcataacaacattttcttacaaagccacaactaatcatgtcattaatgggtaattccaaggtagctagttgttggtaatcatgcatctccaaagtgcccagtttctacatggcaattccaatcgtaattaccatgaaattatataactgcaaattatcctgccgtgtgagtggtgtaaataaatacgtacctgctctgtgataataaacatgaatgacatggttagttaattagtagccactggaaattcactaatggcctaccaaaccagtaactttctcctgaagagggaagaagattgttgatgtttgttcagtttggcttaatcaaggctttagtgaaggcattgatactgcctgctctttgttttctcatggttccttgaatctggaaagtgaggctctgttaagttagcaaccaggactttccaaagacattaagtcccacacactagttatatgacttggggatggtgcttaatccttctgagcctcaaattccttctctgtaaaatgggagtgatgccaacttgatggcaatgcatacctcctggggttgtcgaaaggattagatgaggttacgtacagggacacatggtataaactctccaaggtttgctgttactggctgagaatgggaagaaagcccagcttcacaggccatcccacttttgtgctcagagggctgcgtctgattcagttgggtgtgaagcactatagcagagacgctgtcacgctttgtcacttgagggtggcagattgaacccagcactgaactcttaccactttccaaagggagattataactccacttccatcaggaaataagggccgatgcttcagatgcgtgagggaaagggattacacgcaaagaaacttaactcctgagagattatattctcagcccttgcctttaactggtaaataaatcagccaagagtacactgaccaggaaaaacaccagttatgcaatgcgagggctctggcccagcaaacacagctgcccctcggccgacgtttccctactttctcccagatagagctgctcgtggatgcctcgtcagttaggaaaattccagagggaaaaagtgggacagcacccagcagtttcccgggagtgtctaggctaggctcgtagaactttcaaaaataagaccaagaaaggccactttccttacgacagaaaactaacgctgttactctccttacataagggctgcaccttgacacacagaaagctactttcagggatgatagatttatattccaaagggctactaaacttgtaaccatagtaacaaacaaagctattacataaaatggctttgccacgtaaaagcaataattatattaaccagatgggaggaaaaaggagaaggaagtctgatcaatgtggaaggcaccagtaaattggattgaaaatgcatgacattttcctaaattacatctgtttggggaggcgggtaggtgcccaaggctgaagagctgtgatgaagttgggtccaggccccaccaggtggcagtatgcagaagttgttgaagcagctcctctgttgagggttttgggctctggaagccggatacttcttcaaggcttgatttgaaagcaccaccccctcccatcaccagtgcgatggggaatttccctgtcaacactaacagtgtagaactggcccaaattagactttattaagaaggatgttggttgagaaatattctagttgcaataagcaatgtatgctaagcgaaacatcagcatgttctgattaggccctgagtgtgtgatacagatcagggctcaccgtgcagttaactcctgagtttctaccctgatctctaacacttgaccttaaacttagctgcatgtcagaatcacctgggggtcaagaggggctttaaaaaatactgatgcctgatgcctgagtgtcatactcacctatcaccttttctgatttaattgaatgtgatgtggcctgggcattggtatttaaaaatatatatatatccaggcaattctaatgatattttcgagggatggatgagtggtaagctatttattaagaggaagctgatgcgaaatattcagaattggcatatttcggggcaaagggagctagggactgacttcctcatcgactgcttcctcttttagtcaagtggatagatctctgtttaattattccagctcagaaataccagctaaatcacatagaaaatgttgtcctgatgttttagactgtctgcacgtttgtcatagaataccagggtctcttcccttgtttccaatgcattgtgaatctcagtgaagttgccacctgtgcaatccctggccaatcagatctgttcctttacaaggcagggaggattacacaacacagacgcattggagggaatctgaatatctagctagatcttgtgtaatttgacccaatcagtcaaacgacacatacaggaacagccctgggaaaagtgtaaagtcggcagaactgccttgtctccatcactcctcacctccccctccagtgccccacccagtggattttaaacctttctttccttccagtcaatttgagatgtgacatgttggtgagtgaaataatgggttaatcagggaaagaaacacccccatgtctctgctgttttatgaactttttctaatagccttcctgtaggagcccttattatgtgaagcgcaatgtgctaagtgctttatctcatttaatcttcccagcaaattcatgcggaagccattattatctccattttatagaagaagaaactgagacttgaagagtgtaaatatgttgttcttggccccacagcctgttgggatttgaacccacattcgagcgagctagaattctgatcttatgctgcttcctcttccacttcttcaagccgaagcttcctcatttcactgcccaataatggagccaatagccacatgtggctatttaaatgtaaatctaaattaattaaaatgatataaaattaagaattcagttcttaagtcataccgcatttcaagtactcagtaggcatatgtggctagtggtgaacgtactgtactgtgcagaaatagagtattcgcgccaccatggaaactttgacaatgccgagaaacaatctggcaaatcatgtcaatttagatgagtaactgaggtccagagaggagaagtgatgtgcctaagaatgagcccctcctctgcactggggcctgtgcccccccagtggaatcagtgctgcctgagaacttcctccagggccagcactctgtaggtgagtgcctgtggaggcagtggccaggattcagtcagaccacttattggggaaagaagtcccaatgctcatgatctgaaatgcagctcagaaagcatgtcttgatgcttcttctggcccatgctggggagagcaggctacagagataactgcccatagccttgtttctgccctcctgggacttaaaatccagaggaacatattgggctggaaaaagctgagtttttagaattagataggctagtgttcaagttctggtgtggctactttctagctgggcaatcttgggtatgatagatagtctctctgatctcccctcctcattcggaaaggcatgatcaccatgaccatctggtaggatttcttgtgagtaccgaaatgaaaggtggaagcatttggcccaatacccaataagtgccaaagaaacattagtgccctccccttcaccaaagcttcttcctggatggcccactgacccccggtgtcctctgatatttctggggtctttcagaaggtgagtaatcactttacgatgtctgagatttttagtcttgactgcttttgtttcctaaatgatggaactcccaagccttggtttccaaggatttgctctccatttctttatcacattcacagattacttcccagtcaagtgagatgttcaatagaaaatttattccgggacactgtggttttagtgcacagttaaagaaaaaaaacatgggaaagaagccagctggactatgaaatattcatttgcatcacaaatatttactgcgttctgtgtgccaagtactgtgataggtcttggaggcagaacagtggacatggtagataaaagtcaaatcccgaaggcaattccataaaccacaaatagaaagcacacctttgtatttcttgtcatggctatagatctgactggggttgtatgtaaggaggagtggctgcctggttctcacaaagcatggtggtggacttaatgaattcattctctgtggctaggagcctgcattccccctcacctccccatgggcaagcactttgggaaagccctttccccaaagcctcccaccctttctctcgcagtctgacattgcagtttacatttggtgcttcttgagtccaaaacaatttcttaattcaacaaatgatcacacatcattccctgactgtgtaaagtacagcaaattagcacagccaaagcaggaaatatttgctctgaacgtgcacccgtctttgttttcacagcctcttcccagtcaatggagtgcagatcatctattgccagacaccatggtatacactagagttacagaggtgaagaggcacggtccctttcatacaaaagtcagtgtgaaagggagacagacattaacagaaacacttaatccaccggactgagttccataggaagcagtgacatggcaaaaggagtggtcaattgtttggagggaactatgagatggaaaaaacaggaaagataattttcaaaagacaaagcagcatgcatataagggcataaatattttttgttgagaccccctttaatagactctaactctacagttgttactttgacaccctatacagtaaatccatagtatttaagcagattctatagtcatccaaatatttgcccatagccattctttaaccgtgtctgctgctaacaaatgccagcaaagcacagcattgtctttgttttaacatttcccttaaaatagggccacctttctgttttccacctgactcacagtgaaacagaaagacctggaatgaagtaagtcatttggtgccctgagataaaggacagcacagcctgtcacgtggcagtcacgggggaagttgtactgacagtctcttagaaatgcaaaaacaataagggcacttggcaaccagaatggaataccaagacgttggccaatttcctctaggctttcctgggagaggtggctgtaggaggctggggtggaggggctgatcacaggcttgctctactggctctagaaaccagaggtgtaactgggagctctctgtaactttccaggtggtgagcatagaggctatggacatggcagggatttccatgtccacaccaagggcccctccctgagcctgagcacgaggtggtgagctctgagctcactcctgaatcccagcacataatcactcagaagccagggaaagaggaagtcctccaaagcgtggctgcccttacccagtgttttgtggagcctactttaggcagattatcagtaagaataaaccctatagtgctataatgggcaagcagtgataccttttcaaagcactatttttttcaaattgaacttgtttctaaaactaaattatggtaatggttgtactactctatacatttactaaaaatcattaaatatcattaaattggatgcttataatgtgtggattttgtggtatataaactatgcctcagtaaagcagttgtaaaaaatttttaaatcacacctgttaatggattccccaaacactgtttctctagcacctagaggtggtgattttttttgttgtgttttgttttgttttgtttgtttgtttgtttgttttgagatggagtcttgctctgtcacccaggctggagtgcagtggcacgatcttggctcactgcaagctccgccgcccgggttcctgccattctcctgcctcagcctcctgaggagctgggactacaggcgcctgccaccatgcctggctaattttttgtatttttagtagagatggggtttcgccatgttagccaagatggtgtcgatctcctgatctcgtgatccacatgcctcggcctcccaaagtgctgggattgcaggtgtgagccaccatgcccggcgaggtggtgatttttttgtttttttgttttgttttgttttgtttttttgaggcatggtctccctctattgcccaggctggatggaatagagtggtgcaatcatagctcactgtagccttgaactcgtgggctcaagcgatcctgtcatctcagcctcccaagtagctagaacgacagatgcagcccccccacatctggctatttttttctctttctttctttttttgtagaggcagggttttgccatgttgcccagactggtctgaaactcctggcctcaagcaatcctcccacatgggtcgcccaaagtactgggattataggcgtgagccactgcacctggtctggttcagagagtttaacaggcattgccttaagcaaaatattggacaaactgaggagtttctaatatgcctgttgtgccctttctccacctctgtgaccttccctcaaatcagttactgggcaggttgtggtggctaatgtctgtaatcccagcactttgggaggccaatgggggcagatcacttgaggtcaggagttcgagatcagcctggccaacatggcaaaaccctgtcttttttgtattttgtaaaaatacaaaaaaaaaaaaacttagccaggtgcacgtctgtaatcccagctatttgggaggctgaggcacgagaatcacttggacacagaagttggcaattgcagtgaaccgaaattgcaccattgcactccagcctgggggacagtgcgagactgtttcaaaaaaaaaaaaaaaatcaaaaatccgttacctgacacttttctcttttagcccttctttctcccaaaacgaattgcttagtattttacttactcattaaagaatgcgtccttggctttttaatatatttgcactttaaacctgtctttcattctagaatgatttttaaaatcctcattcaaggatttaaaaccttaagggaagggatagaagggtagtgaagaagaagggctttcccctaagatcctagaaatcacaacaggaaggcaactatctattttgtccgccagtaaagtcaactgactgagtatgacagaaaattgggttgatctgatgttctcaaacatggccgtggaaatggccttgagagcagaaggtgtgttgaagactagtccaggcattccatcagtccaccagtgaatcagatacaactaggagcttccgtcacagaggagcttactgtagttacaaaaacagccagagtcagccgggcacagtggctcatgcctgtaatcccagcactttgggaggctgaggcaggtgaatcacctgaggtcaggaattcgagaccagcctggccaacatggtgaaatcctgtttctactaaaaatacaaaaaaaaaaaaaaaaaaaaaaaaaaaaaaaaaaaaattagctgggcatggtggtgggcgcctgtaatcccagctactcaggaagctaaagcaggagaatcattgaacctggaaggcggaggttgcagtgagccaggatcgcgccattgcactctagcttgggcaacaatagcaaaactccatctcaaaaaaaaaaaaaaaacccaaaaaacaacaacaacaaaaaaaaaacagccagagcctcataaagatgatttatgtccatggagagaagtgtgaactcctaaatattgacatgactgacagtgtggggatgaattcaattagttgttacagtatcactcttttaacctttaaaagcattttgcatgtatcaagagagaagccatgtgattccatggagaaaatgagatggaactagccaatctgggtttgtaccttgtctgtttctctctaagttctttgtgaatttagatgagccacctaaactctctgagtctcagtcctcccatgtctaaaacgggacccccaacttcacaaagttgttttgaggtagatggtgttaacctgcttccacatactgcagagaataactgtgattgaataagaggagtatttcactagttaaaatgctctactctatttacttgatcttccaaataattttctgaaaaaagataccgcagatggctattactatctgatggcaaagaaaaacagtagtggctaagtgacttgcctgggattaatattcacatttcctgataagaatagggctttctggaagccagcatttttaagattctgggttagtttccactgtggtttagggaatccagtcaggggatgtcaacattgacatttccccttccaattagtctcaagagttcacatatctcactctgttcaatacaacctggagtgtaatcatttgttggtaataacctagcccttgtttagcctcatggatctgactctgaacctggacatcctatggacaaaaacaccacttgctttttattggcatgttgggtagaatggctccacacagccaggaaacaattttatttttcccctttgcaactcaattatgaggctgaagggcacatatagatttttctgcaggaatcaaagggctttcaggcttacttgatgagtagatttctgcatcacctccgtggtaaagggttagctgcttttaagaggcaaaaatgcccagactgaaataaagaaggaaaaaaaataataatacattccagaccaccttgtaaaaaataggtaggcgttctcaatcttggcctttcactccagtcccacttgaggccactctctttccagaggctctatggaacaacaagggtggtgagaacgctgaattaggaggcaaaagcccatgctagtgttctgtcccctaatgtgacccacgcttagtggggatcctgttcagaaccttcaacctgctcttcctctgtctctctgcctataaaatgagggaagtagattggctactttaacaaatctcccctttataaataacttgtgactctattttctatggttttttttcagagtacatctttctccatttatttatgtgtgtgagggttcaatcgttcgataaaggctatgtttgagagaagatggaaaggcatggaataagttttgatcttgggtttactgctaacattgacttttcccgttagcccacctaggttctaaagagctagtatccagagctttgacacatggggtgccaggctttgtttctctgttaaaatcccccaaatttcctgactcctcagaacagctcagctcagctgggagtctgtggctgaggctggccgagacatcagcagagtacctggaatggaactccaagcaggtcgaagcttgggagccagtgtccttgcagtctgaatatttggggtggagagaggtaactctgttatgctcaccgctgggaccacagcaagaattcctttgccaccatttctctagtcaggcggagctgtccagggttcaggtggctttccaggacatgcttcaacttgcctggagatgggtggtgtgagcagatccctgggtgtctctctctggaggtaataatgacaaagaggtttagccactgagggagaaatgcatccccaggtctgaggggatatcccttttcttcaaacaatccctgggttgtttgtctacagtagaactctctttaataaaaaaaaaaaatgaaatgaaataaaaataaagtaaaagaacgcccatcttcagtataccaagcagcatgcagggcataatcgcctcaattcttggtatctggcacaatgttcagttggcagaaccacgctttctgtgggggtaataagcttaatatttagcctgcattactggggcagtggtgaagggagggggacaaaatgggagagagaccactgtagaaatggatattgaattccaagtattattgttggaatctctggagaaaatggctcctgaacatacaggattttcagtacagtttaaaaaaggaatgactcttctggtttttccatttactgtagcttcccaaagcttatttttagtagcactaatagtgccgcctacccctgtactcattttctacagatttgaaaatttggtattatcctgtctctccagaggtgccttctatttctaaaacattagtaccatggaggggggaaaatagggcattttctgagagaaaggagccttggatatttgcattccattttgattagtattttttgtttctctcagttcattcagaatcaagggaaaacatatttaaatggatataatgtgatgccaagtgcctctggacaccaaaagcgccccctccacacacaccctacggtcagctcaggcatgaaggtgcatgtcccctcaaggccaggctaatggtggccctgactcagaggcaggcctcaccagcatggatcaactataaactaaactgcagaaggcactcatgccctgggtgagctatgggcagagaaaaactcaggagccccagacacatgtggtcagtgtgtatctgggtggaggcgggacgttccgagcattggagctgaccccatgcacagcctcacaggctggaaccaggcgtctttgagtggaagaagtcaagggagtcccattagagaaggaccctctgtgttcactgtgcacctgggagcaaggtttctcacaacagactctgctgctgaaaaattagtgtttgagttctaactggagttacagaccttggtgactttgcatagccctcttgacaagcggggcagccttgccaaatgacacatgggaagtggagggtgtgcagcaaatgctatttgtacgtgttggctctgggagtggcagagtatttctgagaaaaaaaacgctaaatgtgggcatcctcagcccagggctcctccttttatcaagagatggctttgtgacaacatgggtgcctgagtcctaacaggcacattacaggtgaagttttgagaaagtattgctgtgttaaatttccacatatggcctcttctagcacgaataattcacaaatgaagagcctaaaatgttacatctggaagtgacttgagatatcttctaatctagcttgttatgtaatcaagagcacggagcccagagagggaatgtcaaggtcaaggtcacccagctggtgtctggtctgagtggatggcccctgactcctgactcctcttacattgctctttccactgacttttgaaagtgacagatggaatggccaccaggacatgagagacatttagagagacatctattccatgaatccccaatgactgccccttgcctttatcttgcctccaagcctcttcttccatactcttctgtgccgtgtagccctgaacaagctgcttcacctctctgtaccttgtttacctcatgtatgaaaggcagatgatgttgatgatgatggtggtgatgatgataatgttggtggggggctgaggatgatgatgatacctccctcccaaagtgattatgtgtcagaacgagcctcagagtcagaaaatcgggttcaaaccctggtgctccctccttctagctgcttggagcattttgagtcacacactcactctgagcctcagtttccttggttttaaaatagaggaaataattcctaactcataaagttgttatgaggattaattgacaaactatagatgtacagctcttagctcaaatgctcaatatatagcccctggtattactacaattgccaataataataatgagtttgaaaaatgcaggtacaagtttttttataatctgaatgtacaataaaaatcttagttattattaaccaccgtggccgtagtatccatcccaagctatcagtaagatttctgcatagctagcccctggattggccagggctgggtactagattggcttcctaaaattccttaaatcacttgtttgcctctgatacagtctggctatttctgacacggccaaagagaccacagagggcattaagctgcagaagagaaactacaaacaatatctgagagagggagagatttcctagaatggctgcgaccacctccctgccagtttgatttcctgtgcagctgtgtgtgttgaaaagattgatgtgggcacgacctttagaccctgtttgaaaattacacatacaaatggtactttaatggtacatgtggtagttggggggttgtgttaattacatttgaatagagagatggtgataattcactagctcagcccctggtagttaattttgttacatctaggggaaaattctgttggggtctatgagtagctgtggtgcaattaggcagcaagaaggtttttgtcggtacagttgctattgattagtatttactttaaaaagagtaaaagctattccctcgcgccagggctgcctaatctgtcagaagaagaggctacatgtttcacagacgcatagcaggcttgttcatatattatgaagcccccgaaaagagagtccagtataaaaatcttcccaactggttttaatgatgctcaagtaaaagggatataccacagacaagatctcattaaaagagagaagtctttttgtagatttgctgatttatttatgaaacacctctgaaatatttataaatgctttcctgatatttatctgaaaatacattttagggcttctttggtagaagagagggggagaataaaggatgatgagggtggaagaacaaggtgaattcagcaccatttctttcagtagcaaggaaagggatatcctagggtataggaacatgtcactagggggtgccccaagaaccaggccggctctaacctgctcagcacaggtgaccctacttgcttggatctcttaaacagaagcaatggcaatcacaagtgctctgtttaattttcctgacagaaccggggcagatacagacgctcttgagggctttatcacttccttcacttttagagctatttattaattgaaataatagttatgctaccccttgcctcagacctactttcatctgtttagcaactgctttctatgaaacacaaaagagctcagcaatgacactcgtgtcttaattaaccattgaataccttatagagcagctgtcacaactcttgtcacttgaaaggaagcacagtggtccctgtttaaaaagaaaaaaaaatacacagaaaaaaaagttgatctaatgagctgtctttgacatttcttaagaattgcatattttatcatcatgctttgcactcatataacgatgcaaattaaggaacctctggctgctctggagaaaaaacagtgaatttacatttctcccaactgttcagaaggagacattggttgcccagtggctaagggaaatggtcaagatcagagatgataacagggctaagactgcatatcaattaaaagaagaagaggggttgatgtcagtttatgtaactaaaatatttccaagcctccccagcccatggtatgaatgagtctcattaacattaaagacgagcgcccccagagcctcaagccctcacccgtttgttcaggtaatgcagtccttcatgcagctcatcccaacctcacattttttgagttcccaaagaggtagacatgttttatatgtgttttggaattaatctgggcttccactcaccattggatgctgcctgctattctgagctgtatcaatgtcttcaacattggccttgaccaccccaaaccacaccacccctatttttctttattgtttcttctcatggttatgagaaggccccagccaccagccttcttccgtcgttcattaccgtgacaggatagcagcccgtgttgaagtgaggaaaacgttttctgtctctgtgctcatttagatgggtagtttgaatagagtagtttgagccccaaagtgtcttagaatttggtgagagagttgtttcagttcacatgtatagctctttctacctaaggtgtgcacagcccctggaagagagggtaaaatgagttcaaacaccagccaccatactgaaggagaacatttcacccatttcagcatctccccatttacttgctgacttgtggctgagtctgttggccctgccagattctctcacagtgacccttcttttccatccctgtctcctgacttctgcctgcagtctcctcttcaagccatcatacttgtctatgcatgtttgaatcttgattgttgctacagttcaagttcacctccccaactaggaggctccttagcccccatgcaaataaccattgagggaaaagactctctccttactccaacaccatgtatctgaagctcagctctcttccagccaggacgctcatatcataaagaaaaacgttattaagagagaagtccttcagtaaaacccaggatatatcttaaggaggatagatgttcaaatggcataataattggcttatttcaaatatattacgatagttatatgttatttgaaccactacaaaggacaccgatacctactaactgctctgcaaattcctcaagggcaaaacaaatgctgttcctgacactgagcactcagtatgaatgacagagaaatcatagcaacctgaggattgttattattgatgtttcatttttgtaaagcaaacaagatactttatacgtcgtatatgaatgcaaaatgtacccccacaaacttatcaaatcaatgaagcaacaaagcattatataagaggtttgctgtggaagttttaacatgttagaagatattatattcattgttacccccatttaaatcactatgtgaacttgtagagaccgacctccgattttgcataattttaaattcatggtccctgggaaggtaatcacccctttaataactgttgtgtttctctttattccaaataaggtgtgcactcatctgtgaatttatgttgggctagcacggtgtaaaattgccactttgcattgcatactacttggagaaaggtagaatataatagcttcaccagctgaatttcaaaataaagcagagccttgaacattggtaccctatcgtgtgctttgggctacagagactgaggaggcctgatgcaaactggacagaattaggactctgaggatgactgactcacaggggaaaggatggttccggaagacattttatataaagctgcttgccaaatcggccaatagggcccataaacgcgtccaacagtagaaacaacagatcctgctggtctctgccaagggtacctctgggaagacagacagtgttacttgatttactctgaagctgcaatgagaagagtctagagcccagttttgcaggcttcatgtgccattagcctctctcctcacctacatcatcccctcctcaggagtctacattgtcttctcctggaaccttccaaaacaactaatataaatttcaagcctgtggttggtgcttgatgaatgccagttgacttgaccactggagtgccacctctgagctaatagactcagccagaaaggtcaagatagtgtcccatatacagagaggaagaccagaattcatcccctgaataaaaagcttcggattagcctactttctctccaaagcactctgtttttcaactttatttattgtgtctggcagatatcctcaattaggagctaataaacgtgagcatttataaatcttcctttcagcggagtacgcccctagattcagagcattccgtgggcagctgtagaagaggagaaaagcgttctgcccagtgaagggctagagtcagctcgtgagagctgattgtgtgcctctttccctaactctgaattcagtgacctcgttcaaccacggtgggagtatttttaacacagaaatcagcagagagtagaaaccaagggttttcctctcagagagtgattttaaagcattgaccagcattgtcttctgcctcactgtacctcaccttaccactctcttcttgaaaaagatccaaatcatctttcagctatgtagacatgactctaaaacaacacaagatagagtctgattcacagcagaggcaagccgtgctgcttctctaggcctggattctaaatgcagaacagtgaacctgcaagcagcattcttagggctgagccattctcacgtgtaaatggagagttcctttcttttttcaaacccatttttgcaggatggagggtcctgtcttcatctcagatgaatcagtgggaagctgatccacagcccacaaatcccttttactaagaaggatcacctggtaagctttgggttactctctgttttttaaaaaaaaaaaatcataaaattgaaatagttcaacatagatttgaatctaaagagccttcactgcagagtttatctggtgaccatatgacactacaaggacagcttttaaaaagccaaatatcaatggctgaagaatggaattgaagtagaaaatcgagttagaactgtattaaaacaagtcatattattcagctttatctataatattgtctaattcatatttcagtagtagcatagaaaatgaatctgattcactatggttaattagcctccgggttcccaaggtgtgagctgaggcaccctggacattgcagtggcctcaaaggggtgccaggaaatattttaaatagttgaggaaaatacagcaattcttgacatctgtcaggcaccgtgtgaactactagctcaaggtagttcacagtttcactactggaatgcataactttctttcagtgatgtcatacctttgagaagctaagttcttgtcagttgctgtattataaaacaggaccatgtgaaaatcagtgtggagcaggaaacaagggtgagggcatccaacctgatgccagagtttgagaagttgcgtagtgcccaacaggctcatgcatctcactattaagcacttacgattatttaacagtgaatgggactcatttttcttttagtttatgtgtattctttttttcagaaatcaagttgttaggacataaatacttgttaagttatttgggtgtaatttacaaataaacagaactgttagatatttctttcagctgagatgggctgtaaaaatggacagaaccattaggaacatcatgaatcgccgggcgtggtggctcacacctgtaatcccaacactttgggaggccgaggtgggcagatcacctgaggtcaggagttcgagactggcctggccagcatggcgaaaccccatctctactaaaagtacaaaaattagctgggtgtggtggctggtgtttttaatcccagctactcaggaggttgaggcaggagaattgcttgaacccaggagggagtggttgcagtgagctgagatcgcaccactgcactgcatcctgggcgacaagagtgagattccatttcaaaaaaagaaaaaaaaaatcatgaatcaagatcatttaagactttctcacttagtgtaaaaggtaaatgatcaatgtccattactgagtaaatgacaagaagtatttattgtgtgccttctacatataggcataatttcaatactaaacacatatgcacacacatgcacacacacctaaggagaggtggaaaggaataatattcaggaagtagtatgtgtcaggggcagatactttacatgtaaccttattatatctatgcaaaaacctaggaggaaggccatatggtcctatttttttttattttttattttttttgagatggagtcttcctctgtcacccaagctggagtgcagtggcacgatctcagctcactgcaacctctgcctccctagttcaagcaattctcctgcctcagcctcccgagtagctgggactacaggcgcacaccaccactcccagctaatttttgtatttttagtagagacggggtttcaccgtgttggccaggatggtctcgatttcttgacctcatgatgcacccgcctcggcctcccagagtgctgggattacaggggtgagccactgcacccagcccatatggtcctcattttatagattataaggcagttttggaaataagatatatgccccaaacacacatgagtagtaagtgaagagtcccgtattggacccagctctatctgactctgaggcatattcagcctcatgctaccagttgtactagactgttatgacagcagtattaaaatagcaatccacatttttcaacatcaatgtagaagataccatttaaggaagtctgtgtaacttgtgtgctgtaacttgtgtgctgttgggctactgtttatgttttcctgtgctgatcattttgtgtgcgtaccgaaatctgtatgtgagcatacattttaattcttcccttttctcctaatgatgtgactaaatcatttccttttgaaacatcccatctggcagacaataaatgacctttcccatcttggactttgtagtttgtacttaaccaagtcaaaaagcgccaaatgatgccagttgtattatggttgtgaggatgtgtgatagtgaagcttaacccacagcaattaaagcaactcagaaaaggagctgtctattcagactaatgaggaaaggctatcttgttctttttaggaacaactaaaataattctgcagaaaatttgctttactggcctttgcataaggaaaaacaggctctggaatagaagctagcatgaccctgcttctcccactctgctatattggctgtattagggaaggccttaacagcatctcaacaaagagtttgactttgtggtctgacatttgtataatggatattctgtacacacattccctggaatttgttgatttagagattactcaaactccatcctgataaagctctatttaatctgggtttacttagtcgttggtttagtttgaagtgcggggagttgttttggaaagtaggttgctacttgtggtgaaaaggctttttgctgacgtccttacctggtggaatggtaagaggtggtttcagtagatggccaagcattggatcagatatctgtcaacctaacttgaagagaaagccatgaaagaagtgtggctaaaaactgctgggttatgcttgctcaggaaactccctgtctgggtcacttaccttttattactaacttttcactcagtcactatactggatttcccctttttcctctcagaaaattagtaagcatgtcatttcctatccacatctatgcatttcaatcagataagagctgtgaaggtaccacgtccatgttggaccatatactaaacattggcttattgcatgatgtgcttttgacatgcccaggtagctgaatgcagagttccatgctcttcatattgagggtgtttgaaactggtatatgcagttacttctatgagatcttccctgggagatactacagaaggatgaaagaagatgaagttggaaaatgacatgtgtaaaacatgattacctattggctgccctgtcaaggataagacgtggtttctgttgcattgcgaacaacccctagtggtctgcagatgagctgctgctctttgcctccataagtagggtgtttggaccaccccttactcaaatgctagtttacagtggcatgaatgcattaacttgctgggtgctttctggaagctcaagggaatatctaccatggtctcatctattagtaagcctgagaacatgcattcattgaccccaaacccatcccctgtgccctcatatccgcttcctgaaaactgtatgctagatagaaccttttcatagtcattttgaatagatattcttagagcacttcaccatccagcctatgtgatgtttctcaaaaaccaaaaaagccagaatgcattgccttgttttctgaagagttctgcctttcctgcctccatttctctctttttttttaagagttagagtatcactctgtcacccaggctgatgcagtggcatgatcatagctcactgcagcctcaaactcctgggctcaagtgatcttcccgcctcagcctccagggtagctgggactataggtgtgtaccaccagtcctgactaatttaaatttatttatttatttatttatttatttatttatttatttatttttagagacaatgtctcactgtgttgcctaggctattctcaaagcgatcttcctgccttagccttctgagtttctgggattgcatttgtgagccaccggggccagctcccctgccaccatttcaaccctgagaaaattatacagaaagatttaccagtttatttacttctcttcctacaacctagaacaaagcctgtgcctccagtaaagagaaggcctccaaagcctaaagaccatcctgaccctgccccacacattctttggagtcatcagaactcagtttgaatcttattcctgtcatttactgatatgcagttgagccaagctgagcctctgcttctttggcctgtaaagtggagaaaagtattcttcattgtgctctcatctcatctattgcatgaggcagtacacctaaaatccctagcacatagtagattctaaacaattacagcttcctttcctaatcttacagttttttgactacttaagatcccatgttcatcatttttgttactcctggatagacttagaaggaggtaaaggtggagggaaatatcaagtctttttctaatccaatatgggctctatctttacttttcacaggggtcatcctctatttattatgggtacaatttttctttgtcctattccatcactttggtgcttaacaggaagctcaaaatagactgatcatggctgagacttagctccttcgctgtgtaaattttcacactgcacatgttccaggttcatcctctttcatttaagtttcatctttttgagggaagtgcaatttcatcagaatacctacataaatacaattcacatgtcatagggaaatccaaaggcttcaatttgggggctcaaaaagatgtctttagctgcagggcatctatccagtggatgtggaatacagaaacatgggttcatccctgagcaagggtaaatcagacatggaaacttttatcctcacccccagaatagggagtcctggtctctggaaccattactgaggtcattggttcatgcttttctttacatatttacctcgtatttacacccctcttcctctacaggagaaggatttgaggcaactgtttaacttattctggagtgaaatggagattaatgtgatacctcctgattactcattaaccccacaggcaaagatctctatatgtcatttttgagataatgagtgaaaggccctgatatgtaataagttagggcagaactggagtgaaatttgtaaaactgtgggtagacctggtgatccacagatgagtgaagtggcagaagatggccctcctagccccttctagggctttctctcttttctatggctcttgcctccactctgcagtcctgttttccaagtgactggaactctccttggtcccactaccgcccattaaacaacatcgaaaacgtctcccaccccaccccagaccccaggacccactcctgaagctgccttctccaggatgtgccctggtttctcctctgtcttctcaaccttgggtagatattctgtcctgaccatctctccctgagcagccacctcatgagaaaggaaattttcttattgagtactacccaagtgtcaggccccacttagataaagtgatagagctgagcctcttagaggttaagtgacttgcccaacttcatggtgctaggaaatgacagctcttgaatttccactcaggcctgtgtcattccaaccctaaattcccttggctatgcagccaaaaaaaaaaaaaaaaaaagctaaattctccagagtcttgctaattaaacaggcttaatgggttgcctctcagaataatttaatattaaaagggtatttctggacttgaaagtgtcttaaggattttgcagtggtgaaattttgggtataaggtagattgggaagggaaatattttggggttgggatttctgattactcactcatgtcacacatgctaaggaatggcctagtatagtaatgcctaaaaccaggcctgtaactaagacttcctgtgtgggtatcaggagaaatatttatgtctgacaaatggatgtttttaaagggtctaatggaggaaatggaaagtttagaaatgcagtctataaccaaggggggtaaaatcaatgcttattcgcatatggactgttgtgcaagtgtgttagctttccattgattggtaccaacgatgtctaagatgcgttagctttgagtactgataagataaaaaaggcttgggcagacaaagaagagtgtgaccatctgggaagcagacaggaaaatggccttgccaggtcaccctctcatgaggatcaaactccagagtgtctctaagtgcttacaggatgagtgggtcttctctgaacactcacttaatgaacagagacagacctctgtaatccagtgtcatagactccagagactgcccagaaatacagcatgggcccccacgatgattataagagaatgaataagatgaccctttactgatggaattaaaatgtgtgcccctagaaggctgccattgaaaaggtttgggattagcagtgtttgcttttttctaattaaaaaactgaatcacctacgcatttttaaggatgaactttaagctcttgcctcacaaaatgaacaaattgagcagtgaagccttaagaaaatgagaccaaaagtggaacaaggtaaaaagtcaaagtaagagccctagcttatactaattgttaggagggaaattgctgaggctgtacttgaccatgtgcgttgtatgggcaagcctctgaaacatgcactccatgcctgtaaagagttatttccagccactgactttgccatgaatgacagagtttattttattttattttttaaataaaaagcctcagcctaaggaaatactttgctcccacaagatgccgagctattgaaagagccattctgagaggggggtggaggcaggagaagtatattttctaagattttccgatactaaaacccatttacgactgttgagaaaaatctctctgacggaggatttagctctcactaatccttaagtgacttgttttgacagagcctttataggagattttctcagtaactttggtttgctctaaaggagcaattactgatttgtcctccagctccttctttttctaattttttttcttttttaatatatgccagttaatgaacttcatgtatgttccaaaatagcaagtgaatccgatcagaactgtttactgtaaaaattcaggaacctttggattgtcttggatcttccgttcgctttcttgcctccgggtatcaaggacctggatttcatttcgtgtgtcatgtggccttctcagcagattctttgacttgagcttgtggaaatcgagccctactttctatttacactgtactttctctacataaagacattttcaactgcttgaggaatgagcatggggaccccaggtttttaagccttctggtgtttgcttttgctcagacaggcattatctttttagaggtgactgtagcagctggaggacactgcttacctccctgtttaaggcactgcttgatgctgtgacaacgagccctggtgtctgtgcgatttcatttcccgccttgcctgctgtgcctgtgcagggatgtttaagttgcacctcacattcttgcttctatattttaatgaagtcctaacaccaggggaggcctgaaagtgtcttttcagcccagaggttcccaaagcatggttccccaggccagcagcatcagctcctgggaacgggctagaaatgcatattctcaggccttgccccagacctgcagaatccgaaagtctagggagggagcccagcaatctgttttcacaaactctccaggtgattctgatgcacactagcgtttgagcggcagttttctgatccccttgctcatcctccaggaagactgcaaaggaaccatcctccaaaataaccaccacctactccctcaaaaatcctcagtttgtgactccacgcccaattttgctttgtgacttcggaagcctcatctgcagttagatttctggtcctaatttatgactgtgttcactaattttttttcttaatgtcagaaaaccgtgccagttacaggattgtcgttagggtgtggcgggagagattgatgacttttcacgaaagtgtacaaaactctggacaagcattaacatattgcattttaaattattcttgatacttttttgaaagccgcctgctttaatcctcttgtcagggagctgccgtgttaaaaaatgatcgctgaagcggctttgccagcttcacatgaaaagtgaagcggtgagggctcttcacaggaagaactctggctgcgggccgcgtggctggtggagggagtctttggagagagtgggcagccatgacatggcttctgaggagaggagcatcatgggaagtgtctgggggtggccatggggtcttcccgcaggcactttagcgatcaaaatggctgctcggccgaggtggcagctgctgtgggctgtgaagaagatgaaggggcccagacgggggacttgagaggtctgggtttgggtcctccttttctcatcgccaagttacataaccttgggcaggtccattagcatgtctgacttttagtttcctcatttataaaatagaggaggttatgccaggtgacctctaaagatcctttcagctttaaaatttatgattctgggatttcttctcccatctgacttcctgcactgccctttcccttgtacacaggagcagctgaatttattgatcccctagaggctttgtcacccacttcttccttccttcagcccccgcttcccttaggagcctctttcttagagggcttatccaaaatttaaaattttttaaaaacgcacacacacacccagacaaacggatacaagggaatccacttggaaattcaactgcatatcggctgctttgatttcttgtggaggggtaaggtgggcacctaaagaaaatagaaagtcaggggcggtgccaggaggagtttcgcaggggcgcggagtgggggtttggttgtccagaaacccttcagagaaactccaagtgaaaatgtttaataccctcttccctcagaaaaccagggctcccagcctaatcccattccctcttgccttgtcctctgaagaaactgagctgctaaaaacacagcagaggtgagacaaaggacatggctgctaattgctgtcgagcatcctgggatagggggtttggggaatgtcctatcatcagctcgcatttgcttccagttctgggaattctcacgtctttggttaaagctgtgtccttgggtaacctggtgaagcaggtcatttgatgttgaagcacataacaggagacaccctggtgattctcttcagcctgctttgctggactgaagtttaaaggttagatgaccctttgcaagctgaggctatgctgggagaattcatctggaatcccaaactctcacagaagcagagggcaatgggagagggggtgggcaggcaaatgttatgtgtttctcaccatttaatcgctcacgtaagtgcattatagaatccgatacaatgttccagctaaatttatgtgacgttgatggtaatgcgacaacttcttgtcaggctgggagcatgccaactttccttcccttttaccttgtaacctcctgaaactggaactcactggaaaatttctttcacagtaagatagggaaagagtttatctaatgaaaccattctaagtatatttctttgtcaggaaagtttcagcctctagagtgaaaggagtgaaggatgaagttggaaaatgtggcttcaacttcctctacttttcctccctgacacagaggtgtaggcatccattttgattgtatattcgtgataccaggagagtcagctcgaagtcttcattttaacctgggtaatagacactggtggtaccaacagtgctcacttaaaaaaagcataaaggcggggacttttggaggattgggcaggagaaaacattataaggcacgggttcaggtgagtgggtgtccaagcaaaattgcaaaagcttcaagtttttcttcactggctccttcactatataattaccctcctcccctggaaaaaagttaaaaatatgttaagagtttcaatattcctgatttagaatctttgggaatcttatttaaatggagtacttgcttaggaatcccaagacctggaattcccatctgagtgtgctgttacccagccttgtaacactgggcaagacatttcccatctttcagcctcaggttcctcatctgcctaatgaagatgttggcctcatcaggaatggctaaacttcaacccacacccttaaatggcaggcatccgtaactgactgcagcagtctttccaatggattctggatgaggcctcggaatcattctcaacacagcgcctgccccaaacagccataattcttttagagcttttttcaaagatgaaacttctttgtcatcttcctctggaggaagcttggaaattggcaggatatcatcagagcttgtaggagtggtactaaacccaccctgaaggtttgggaagccacgaaggcatccaggaggtggtgaccataaagctaaatcttggaaaatgagatacatttttaggagaagggagaaaggattttcttagcacaaagaacagaaaaaccaaaggcaagaagctagaaaacagcatgcagagtaggctgcatttataatttggtggagtaaaggagtcacgtgcagaatagcaggaaatgaggctggaaagacaggcagaggccagagcagagtgggcactggaggacaggctttggaggtgcagttcactgactgtcctagtccttcatgctcctgccttgccacctacttactggctgatggtttctgagtctccgcctcttgctgcccgtttgacttttctactgttcctggctctgactttctctggagctaatattgttcctctcatgtctgttgtctgtgtgatgtaccaggtgctgagccttgacctgagggtctccctggatgcttctctgttcctgcatattcagagcagctgcccatcagtttttctactttgtatgtacatctgactcttcactgtcctttcaccctctcccactgcacacatgcacacacacaatgtgcacacacacgtgcacatacatacacccacatatcagatctgaagtttacatcaagggtgctttggaaatattacataatgatagcttccttcagataaagtttgggccagttacaaaaagaaaaatgggctcatttgcaggatcatattggctcacacatggtagagggtccttttgaggctctaatgggcaggcagctgattctaacagcagaattctgggtccttgatcttcccgagacatctcccccctgttttgaacattagctgtggtgtgggtccttcccacggagaactgtgaatcctattcaaccgcctccttgtgatttggacatgaacagggagctttctctgtctacttaattccctttgaaagctttctcgtcccactattgggcacttcagagagagcactgcattaatatcttctgctctggtttcaacttggtatggttttgtgatcttaaaatagatggaattaccacggcaagcattgttctgccttgaacttaaagtctcaagagcaagtacttctaaaaaagttaatcctttcttatttgcaaggattctggcctgtagtttacaaagaaatatgctaaattatttataatccaggattactgcaatgccaaagatttccttgcataacatcccagcatcactaaaatggctcaaaaagaacagccctcggccacaccttatcaccactgctctctctggtccctgtgaaggggccccgagcagggcgatggtggctgatgccctgaccacaggaacacatgttctcctctgcagcgtcatcctccatggcttatgtgctcacaattctgctgctggggcctccagggcaagagaaaagcggagatggtgtggacaagcggtacacctcttgatggcaagcatgcaatttcttccttatttaaaatttgtgtactctgcattcttctgaggggagttggtgtggtctgtagttaaagagtggcattaaatgggacattttagaaatatgcagtattccaggcccacctccactattaactttgagaaaactcattgagctctcaattttcccacatgtaaaataagggggttagaataaatgaacgtgaaagtgccttcagctctaacatcaggtgactttaaacaagtactgatataatgcagggatgcgtatgtgcatagcacagacagttggaaaataagactgacctctcagggacttactatggaaagatagactccgagaatcccaatagggcctgccttcagtagggaaccttccagagtacatgaatacatgtatgatacattttcctctattttcaaagttggtaaattacttgatgctgtttaataatctcttattctttgtgtgtcacaagtaattttatatttttaagttatttttacgtccgttgccatccaaaagagttgtcgtgatttacgtttccagtagtagtgtatattggtttctgtgtgtgagttcatacatagaaatttaactctggtataaatttaactctgctaatgggcaaaggtgaaggggaggaggtggaaactgtgttgttctggttttggtctgttgcccttcaacattttaacttgggggattgtgtatctttgcctgcaaggccgtccagatctaagttccaggggcgttggtgcctcccaggcatcctcccgcacagcgcagctctcatttgggtttaccacgaggcctctgatgctcttctctccaactgtcgctctccccaactgttcagcctttgccttcgtacaactgtgcattttgttctctcccaaataaatggatgtcccagcactcactaggaagtctgcaaggcagtgaagcctaattcaccagggttctgagaggaaaatgaacaaatgagtgccagatgcctaacatgctccctggtattccagaaggggggatttccttccccccccccccgccccactcccttccctgtctttctctctaagcaccagtttcctcttctgcaaaaggaagcttgcctagatgtcagtccctgcacaagcactgagtgaaccccctctctgtgctgggcgtggtgctggaagcacagcaccggagaatctagttcctgcctcgaggagttcaagtgggaagtagtcagctgcagccaggataatggtggggtaaacacagcataagtgtgcgacatgggaggcaactctgaccctgagcacggggctaggggtggcagagaagggtcaggagaggtgcctctgaggtggccccattttccttaagcatctcttaaacagcgtgagcagcttctgatcccagtggctttctgtacaattgaagacgcattgtttttctgtggtgaaggctcctactctgcccccacccaccctcccactcctcggagcaggaatgtgtgaggctccctctgcccatcccctggtcagatctctctgccccatcctctctgggcaggaggcctgctgctggctcaggaagggctcatcaagaagcaggttcacctctcccggagcacagacagcttttctctgtggctcactctaattgacaagcacccgcctgatgtcttaaagggaaagagaatcttgaggagagccagaaacagcagggctgaaagagccgtggggtgaaggatataatcggccacactgtgcccagaaatgccatgtgtagggcgggccagacggctgctgttaccttgtggtttgggtttgattttattcagttgcggaaacataatcatcagctgctttccctgagaagactgccagtgtgagtgtgtgtgcatgtgtgtgtttgcatgtgtatatgtgcgtgtgtgtgtgtgtgcatgtgcacacgtaatcttcctctcccttttcgccccgtgtaactcttccttagcagtcacacatgtccttttcaccacactgaaagaacgtggtagaaacaccttctccagggactggtgaccaggcccaccggcctgctgcccttgcttcaggtcaggccagtgtcccctgaggtggggtggtcagacctgacaggtttgggaccgcccagctgggaccctgaaatactcacctggagttgatggagcaagagggcaggtacaacaacaacagaaagcccttgctccattgaagtgttgtgcatccagccgatgagacagcatccgtggccgggtatgtatgaggcaagaagagaagttgggagcctggtgaacaaaggggaggttgaggagcagggcaaggatggagagagacattcctgggctctttcctaaaggtctggctgggttagctggagctactttttattggctaagtcgggctaatttttagattttcttcattttgggctcttattagcctgctgcttcttagatgcccatattggactacacggagtgctagactatgtgaagtaagatgtgagggaatgtggttggtcttacgtggaacaaaataccattgctggaacctccacatcttctcctgctgatgcccgcagcaaggtgccggcaaggtcatgattcagtgtttgcaggacagccccacagcctggattagtcctttgaaacaaccaacctttcatgctagtactgtcctgtgccaaagagagtgtgttatttttaaaaaccccttccctccattctgcccgtccaaatgccagataaccacaaacgtataaccacatagaaagaaattgatgtcccaggagttacatccaacatgcatgaaaagatgccattttttctattcattttgtccgcctgcttctttgtcatttctttctcttttttcctgctcctctgctcttgtctataatatgtcacatttgcttcactttggtttgaagaacttgggtttcatcctggtatgagtcttcaataattctgagacttctgaaattcctgtaaaaaccccgtttagcttccttttatcatgaaacaggcatgcaccccccatgacagcatgacagtgcgagtaggaacaagagtatgtcttcacaactggccaaataactggatcccttcaggccacgaaaggttgcaaatctcatatgctttacatctctgttaaaagatcacagatgtcagaaagggacttgaaaccttttttttctaattccaactctctttctctctctctctctctctctctctctcagctctggcaaagggaagtatcttgctgacaaagaaaccagctttcttctgacctgtcttggttttcatttgtgataacctgatgaagagcaaattacttccagaagcaataaaaactatcaaggaagacgatcttgtagccgaggagcacaagagagatagtcacagatgatgttgttctagtgggctgttgggtttaaatgtggcaactgtgagtgtcctctggtccttgcaaagggtagggatttcaaagttctcagtcgtcttccaagtctatgccacaaactcttagcaggtgtgccaaaccatttcagaaagagactcagttgtctaggaagaagttgtaactataaaatatccccattgcaaaacctggatgaggacacagtccttttagtaatgtcttaagttgttctttcagagttttgattctttcatcatccttacaattgttcatgcaagaaaagttgcttttttcattactgttagacccacctcagatggagatcaaagctgtctatattgagtaaacaaatgggttgacatattttgcaggaggaattgaaatccatggttgtcactgggtggcccttggcaggctgactctataaggagtttaacataagcaagtgcaaggaaaggttccacaggaaccacccaggcatggaattcgggcctttcatgtgggatatttctgcacttggttgtaggcaaaagacgttgcagtgtatagcctttgagacctagttactgcctcagccctcgtgagctgtaggaccgggagatgggaaacatatccaggggcccccacctgctcacctttgtccagtcacttcaatgaaatcccgagttagaaccttcttcttatttttaccatctcaattcttagaactcctttttgatctttttttaatgttcatattatgggtgtttagatcatctgccttacaaaaaaccatgttctttgattttttgggggaaatgtaatctccacatataacaatttctcggctactgaaggactttttggataccagatatggttcttttaaagattccctctatttgctgaaggtctaacagtcagtcaggtggaaatgtcaacaagacaaacagtggggaagtgattccctaggaaaagtcagagtgaccaggaaatgaggcagcagagaagctgcctgagatttgaaaattggacgttaacacagacaagatggctcagggagcacaggctgtgcatacctcttcctgagctccgtgcttcacatttgctttctcatataacaattccaaccattccatcaaggcgatgttgttatccttgttttacacatgaggaagttgaggctcaaagaagttagtagtttgccaaagttatatactgcagagcaaatggcaaggctaagatttgagctgagacaaacagatagcatttgcattgtactgcattccgtaaagactacaagttgtgttctgtcgatcaatctatctgaaatatatatatttttgattcaaagccaacattgaaagtagacagacattgtcatcctcttgcctggaccagactgtctatcactgtaaaacacactactccagaattctgtagccaaagccgcaaccattttgttatatctcacaatgtttcttgggtcaggaattcagacagggctaggccgggcaattcttctgttctgcctagcatcagttagtcacttgttggtattcaactgcagccaggctgcattgaagggtccaagatggcaatacttgtatatctggtaacctggcggggatagctggaagtctggggttcaactgcacactccatgttttctgaggttatctctacatggttctactacagagtacttggacttctcatgtggaagatcagggctacaagagaacatgatggaagctatgagttctcttataggctgagccccagatgggcatggcatcacttccactgtactccatttgtcaaagtattatagaccagtccagattcaaggccagtggaaatcaaacccacttctcactgaagggagcgttaaaaatatatagccatctttaatctactacagtcatatacgctgttttcatagaatgaaatgaaaaggctgcttttaaagacagggcttgctatggtccaaactataaggaaaacaacatttgttttgggggcctgttatttcttcagtgactcccaccttcctctcacccctggattcccaatcatccttgctctatgtccctaaaacctgtgctcaaaaacaatgagacactcatgactcccgtgctcttttgggggctgttttcatcttgagctatagctctaaatgaaggaggaaaggatttttctcttggtaaagacatactgtctcaaaattttgggaggatgaagaaggcaagagagaatgggttttgacataggaccttaatagagtcaataaactccagaccacttcagtaactgctaactctaccccatgacagttactgtggggcccaccctgttatacaggctgtccacatctccctgtctctctccctgtatccctctttcatttttttccctcagattcttttgctctctctccatacacaaatgtggatttatatttttagatttgtttgtttcttcagtcacctcacccagataaccacaagtagtcaaatatacataaaatcaccaggcatttttttctactgggtgacataagtatccagtcattccagcaaaggggcagatgacatttttcagggttgcagtcccaaagaggcacttttgaaaaaaaaaaaaaattctacaaaggatgtgagaatcatattcatgggtctgggttaacattggtctttttaggttgttccagaagctagcctctcatgtctgtgccattttcttcttcttcttgtccttctctctctctctctctttctctctttgggatccttttttttctgttctattttgagcaccacagcatagctcttttattccatttgtcagccacggacgcaatccagttgaaaagcacctccagcctctacggctgccacaatgcctccaatactgtgggggccactggaggctataaccaacgaatctcatttgtagcttctccattgttttagctcttggtgttaccagtgggagaaaagctcaaatcagagaagaatgctggaagagaaaaccagtttgacaaaggagtgctggccgtcaattggctaaatataacacccacacttggaatccatggtagccacatcgtggtatccctcagttgcatcgtggaatgggctttccaagtactcaacaccctttcgtatactcttttgtactccatttttcttttttacttaagttctctgttcctttactttttgcacaaacaacacaatctatcttctatttataaaagtagcacatgcttattggagaatcttagaaacatattaacagaaaaataaaaagattctaattatctgtaatactgtcactgataactatattcatttattcattttaatcattcaacaataattattacatacctactgtgtgaacttctttggataccagggatgcagaaggaattgaaaaggcaagatccctggcctcatggacttcagtttaatggggagatcaacactgaaataatggaaaacatgatctttaacagctgcataccattccatcatttgcatatatttggggttaaacaaacactttttaatataatttatgtattttgttcaaactataatttattaagccatattttagatatttaatactctgaatccatgttgtcagttttccaaaagagtccctatttgtaccacgtatccatccttttcctatgattcgtaatgctgttcttgctgtgctcacaccggcaataaatactaatcaagctaaattcaactgcattttatataggttttctttctttctctctctctctctctctctctctctctttctttttttttttttttttttttgagacgatgtctctctctgtcgcccaggcgggaatgcaatggcttgatctcggctcactgcagcttccacctcccaggttcaagtgattcccctgcctcagcctcccgagcaactgggattacaggcgcctgccaccaagaccagctaatttttgtatttttagtagagatgggctttcaccatgttggccaggctggtctcgaactcctaacccataccctcaggtgattctcccacttcggcctccctatatagtttttcaaaataaaaatagtttcttattctttctgcttataaaatcagtaagtacttattgtaaagcaaaacaaaagtaacaaaccaaacaaatcttggctgaacgtatcagaacaaggagggaaaatcagtacaatcctatgtccagcagtaatcaccagttacgtctaggtgtgtatccttctagaccgtgtgtgtgtgtttgtgtgtgtgtgtgtgtgtgtgtgtgtgtgtgtgtagttaagctccatctaaagggtaagtccttttagaataaacatgctgtagaggaaatatatagcactacctaacctgagtgccgcatgtagctctaccacctccaaactgggtagttctaggcaaatcctgtcatcccttccctccctaggctttggcctagcagatgcttactactgtgttccacttaggccagagtttctcaatctcagcactactgacattttggtccagaacattctttatcatgaagggttgtctggtgcgttgtaggatgtttttagcaacatccctgacctctgcccattagaggtcagtgcatactcccctcctagttgtcgtaatcacaaatgtcttcaaacattgccaaatataccctaggggacaaaattgcccctaatcgagaatgccattctaggctgaaaaatactataattccgtgtctagtgaattttagtggttgcaacgaaacaaaactttgggtgttcgccagcatgctttgtagtgggagacataagagatggaagatacagaacagtggggcaaatcaaggctgaagccccacctgggttaactagcacgggcagcatactggggacagttccgcaacacgtgcgcgggaagacaatgctctgagccatatttaagtctcaggtatccattcatggtcagtgggtaggaaaacacgtttcttttggagtagttatattgtaagccaacaaggtgatgaattattgaatgggttctttttgtataaacatacttatcatctttatttttcatcagttttgtaatgaacaagggaaagcagacacacgaaaacattttgcaaagagcttcaaatgtgaactcttttttggtgaatggccccctggtttgaggtgttatttccttcttgagtggtctctctgcttcaaggacactttttaatgcaaccattgttcagaaaaagtcaccctgttttctaactctttcccttttactcccactctcttttctctctgtctctctctctctctctcttcttgttttttggtggtaaaagaaaggctagaggtttactaaaaatgaaatgacagtgacagagtggccattttgggttttgaaatgtgctttgagcctcagctctaatggccagcctcgcagtttaagccgtatcctgattttctaagtcatggtaaaatggtgtttcatccaatgtagagtagagacttcaggacagttgaatatattgaatctccctttgggagaaatggtgggccagcactgggtcccagcagggctggtcagaggtgcctgtctggggcctcctggcctgatgagggtctctctctagtggggctggaaacagcagagacagtcatgctgagtgtgtccagatgtgggaatggcaggagccatgcagcttaggaggccataggggtgtggtgtggcagtgggaagaaagacaagtgcagtccaagagcagaggctgacaataagaaaggtgcagcaagggtccaaagatcatgatgaagtttggagtcataagactcagtgtggaaaaggcagagtacagagcattgttttcatctcacttctaattaatccttgtttagatcagcatttgtctaaccattgaggagtccataatggggtctacagaagaggccttgaggttaaaataggggtgagagatagaggctgaggtgtcaggtggcaagatttgttttgtagattagtacctgcctcacctttaaagcaaggcataccctaagaaaaaaagttaaatgcatcggcggatttttttatttctggctttctcaggtcagacacgtattaaatttaatttctttgtgttatgttgaatatctataaaaaccagtctgttgctgattattgctatatgcatatattttctccttttccggaggctttgagctggcctacaacaaatccataaactaacaatgggaaaaataggttgaatcaaatgaagttgttgaaattcattggtttttttttgacagtctttctctgtcaccaggctggagtgcagtggcatgatcttggctcactgcaacctccgcctcctgggttcaagccattctcctgcctcagcctgctgagtagctaggattacaggtgcccaccaccacgcccagctaatttttgtatttttagtagagatggggtttcaccgtgttggcccggacggtctcgatctcctgacctcgtgatctgcccgcctcggcctcccaaagtgctgggattataggcatgagccaccgtgcctggtgaaattcaaaggtttttgacctacataagtgacagtagggttgacctaatagaaatcattgttgagaaattaggaccaaaagtaagatagagtgaagaggtggatgccaaaccaatgccagggtgaggagtgggtgagggaatagaaatacatgggcttatagacctacaggatttccagtagttaatccttaaatgttcctggaaaccaaagagtaaggtgagatgtgattggtcagaagaaagaatttcagcctctgagggaggcagaactgctccttacaacttacacatttgtctgtgtgcaggccatattctaggacccatgggtgaaggagtagattacttcttcaaagcatgcttacaggagatgcagtcacagattttataaatctcctttatctagtgacccagtgacaatcccacattcatggggatggcttgtatgtgtgcttttaaaggaaacagcattctaaaatggcacgtagatgtggaaggtttatgtttgtgacttattttacaagtggtgaaaaaggagatgatttgtttctgctaagtaacatttaaaagcatttccttttaatatagtggaatttccagaaccctgaccctaaccctcagtgctattagcctgttagacataaatttcattgatatcctctgatgtctgatctccattggtgccacttcgtgtcctcttaaagtgagtcctcaaatttgtttctgtaatctaaataattaatcatagaaactaactgttctttttaggaaaaaatgcttcaaatcatataaatgtacagttctatgattatcaggttgcatttaattagatgtttagagtatcattttattgacttttgacagttatttgctttcccttctctaagtaacactaacacgagcagctaatatttctagcattgattgtgtgcctggctctgttaaaggccttaaatatattatctcatatactctacccaacagtcctatgatgtatgggtaccataattattctcatgttactgatgaacaaactgaggtttggaaaggttaaaaaaagaaaaaaaaaacttctccaaggccacctggttagcaactagcaacagattgaaactcagcactgtgggccccactaccctggttctctattgcagtaaacccctgctcccctacaaagataggtgatcattctttgctgctgctagtggagatgaagtgtatgcttctaacacatggaaacagttgattttgtgacacaggaacttgggcagtagaggaccttgggagccaagaagaccaaggccagccagattttagaaatcatgactccaagaagtagaaaggtcatggaggtcttcagatcctgtcccaaaacctgcacaagctgacagatgagtggctgagttgggacttgatgagcagatccaccattggtctggaggtctggaatccaaggagcttaaattaagaaaattaaaataaacattgtaggataagacaccaattctggatacctgtagggaggcctacctaatgggaatttttccttaactaacgccctgcaagacattacctcagacataatttacttcatctagaaaaataagcacagtaggtcattacaggagtattgcttccaatagctgctgtttctgcagggcccaggttttcagacagaggtctgagcaataatagtaagttaagatttagctaagaaggctaaaaagtactagcagaggagcagagctttcggggagcaggagtgacctccgaggatggtcaggactcagccactgcagggcgagcaggcggagcctcaaaagatcaaggtggtttcaacacatcttcagtttctgagccatgattttccctccttctgagtcacaccagccaccaactgggtaatgccaaatttgtagctctctctgtgtccccagagggtgaggctggtgaggagaaagtcactctgtcctcttcaacactggaaaattctttttttttttttttttttttttttgagacagagtcttgctctttcgcccaggctggagtgcaatgccgcgatctcggcccactgcaagctccgcctcccaggttcacaccattctcttgcctcagcctcctgagtagctgggactacaggcacccgccactacgcctggctaattttttttttttttttttttttttgtatttttagtagaagcagggtttcaccttgttagccaggatggcatcgatctcctgacctcgtgatccgcccacctcggcttcccaaagtgattacaggtgtgagccaccgcacctggccaacgctggaaaattcttaatttaggctccacaccttattcttcccagcccaaactcacttcagtgggatagtttgtataatattgtgaatgtttaaagcaaggcatttatatacagttagtttgccttgaatagaagtgaatccaaatcgggtctcattagagcaccactgatctatgatttaggcaattttaccattttctgcaaagggaagaaattatgggtatattcagacataattccatagcatgaaagtgaaatctttcttttattgctttgactgctttattttattaatttattttactagtgtttctgaagtagtgaagtgtcaggaactccattaatatggatcttgattgttaacagagtcttagatttgtaatggatttgttatttataagataaactttggtgttttcattaaaaatgcttggatatgataacagtgttataataacaatgagagtgataacatctacctggattttaaaaataataacagccatttttactcacagactaaatcagttaagttatctttggattacatcaaaacagcctcacaccctatcttaagagaacttactatctcaggggaagaacatttgtgtccaaaaaaagtcataagaacactcattcattcatttgacattattactgtattcttataaaatagcgggcactatgctaagtcctggggagagagaggtagatgagaaggttaagagtgtaccacaccaagcaggtgaaagaaacccaggctctcattgttcagtaatactaccttaggtcttaagaggtccttgtgtctgcatctggatttcatacatgctcagcctgatgtgtgcttttcatttacttgccttggtgaactacttctcagccttgtgttgagatgtcctttcttctaaaaagtcttccccaatatctgcaaagtatttttttaacttttattttaagttcaggtgtacaagtacaggtttgttacataagtcatagggtttgatgtacagattatttcatcacccaagtattaagcccagtacccattagttatttttcctgatcctctccctcttcccaccctccaccgtctgaaaggccccagtgtgtgttgttcccgtctacgtgtccatgtgttctcatcatttagctcccactcgcaagtgaaaatatgtccaatatccacaaaatttaatagcacttagcatcttgaattgtgactaggtgtctgtctcgctaatccttgaggaaagagccatgttttcatgatatcagatacctggtaactctcaggcatagaagatgtcccatacacctgtattaagcatatgaatgattgaagcataaacactagatgaagtttctctttgaaaattacctggaaatggtactatgtaaaaattatttcagaaaaaaaaaatcagcaaaaatcctaacaagtgtgctccatggtgtcacaggcagactgaagttgtgtgactcttatcacatagccttgatgtgataacgaaggttttaaaaaaatgtgtgaaggttgatgtgtatgggcatcagtgcagtaatgtccaggatttccaaagagaacattatctttggcctaagaagaaagattttaaaatcaaatttaagcccaatatggcccagatgtctcaagtcagcaaaaccatttgtcaaaagaattccgagtgcctccaacaagtgtggtggtctcctagccgcccccccccccccccacttcctgtaagagcccacaaatgacagatcccagaaagccaacttcagaaaaaacacattttttggttgggggagaccaacctcaggaaattaattctctgtactctagctgtcacattcacaattaattagcttaaagttccttgaaagaacatttatgctattgtggcttgatttgcttgaaatagtagaaatctgtgggacttcaggagggtgtggtggtataaaacccttggctttcacaactggtttttctctttccttgaggataactgacattaaatacgctgaacaactgtggtcttcaaagaagtttttagagaacctgatccttaagtgaaacaagcaaaagtttgaaactaattaccatgaaaagtagtatttcaaagggctccttgggtggtccactggagcctgccatcaggtgaaaaaagccaaaatgtttaacctcctgcaggcgttctggttcacagtgaatctactactgaaggcctggcttcattcatatctagagggattggcttctctcatccaccgtggctgcagaatttattcccagaatgaccatattcttctcctgggtgatttccactggtatcctcaccgttggacatactggtgagacaacagcagacgcatttctaacagaaagatttggttaactctcaaaggtctgtttccctgaagtgcctctccatacagcacagcccagctctagaattccctgggttattgaactgagtgagtcctgctaccatttgtagacatacccaacatttattactcatggatcacatgatttaccgagatccaggaaggacagcaagtgatcagacgagatcctgagtttggaggcacagagcctgagttcctatcctgacttggacactggacattttgtaagttcactgctacataaaatttatacatttgaacattaaattgtataggttgtgttttttaggggggtagattatactaaaattctgcttatttgcagacaaagctgtgtccttgagggcatagttgaagttacaaacaaaatgttttatctttttttttcttcccaaaaatatgcattaagcatcaactatgtaccaggcactgttctaggtgctgggaatacagcagtaaacagaataaactttccaactttgtaggattacattccagcttaggggtcagtaaacttaggggtcagtaagctaggggtctagctatgggaccctctgcaagtcctgtcacctctctgagtctcagtgtttttgttgttaccattattgttgttattgatgatgttgttgttctgatgaatagctagaattttgttgtgagtttcctgtgagccatatgccctgataaatgtttacctggattatcctaagagtctcctgaggtgtagatagtattattcacttccctttatcaatgagaaaaagtgaaagattaaataacttgccccaaatcacctatagttagtgaaaaagcagaatttgtacactagcaggctgaccccagaggccacacttttaaccatgatcctacttcctcagggcaaaataaggttaaaataagtggatgtcctttttcaattctaaatttccataattctgtaaatcattccataaattctgtaatacccctacttagttttggtgattaagaagaaattttatacgctggaataggagttagcaaacaatggcctacatgctaaatcaggccccatgcctttctatattaataaagttgaattggaaaacagctacactcattccttcatgtattgtctgtggctgcttttgtaccacaatggtggagttgagtcttacaaaagacagtcttggcacaaaactaaaagtatttactctgctgatgctttatggaagtttactgacccctaagctggaatgtaaccctacaaagttggaaagtttattctgtttactgctgtattcccagcacctagaacagtgcctggtacacagttgatgcttaatgcatatttttgaaaaaaataagataaaacattttgtttctaacttcaactataccctcaaggacacagctttgtctgcaaataagcagaattttagtataatctactcccctaaaaaaacaaaacccataaaatttaatgttcaaatgtataaattttatgtagcagtgaacttattataaaatgagatttttatcaattttcttgagccaaaaaagggatgccagatttaagataaacagctgttgtaggtttttcttcttcccttttcaggacttcatgccttggcttggtaaaattaatattaacattgaaaaaaataggttatttgttttaagtgacttccctataagctaattggcgaatatttatagaaggatagacagactgctttgcattctgtatttgccctttcttttgtgaattactatgtgaaagataaattccctgatattttatacctattacctacaaaatttgctttttgctccagaatgtattatttgggaatgtttaaaacagcaaccggatatctctagctgcatttcaacttaatagagctaatacagctaattggaggtgggagttgttcggtggaagctactttatgttccagaacaaacttagaaacataatagctgtggcagctttcccccctaagtttgtatagtcatttatcttagcagcaaattaattaattttctttcattatctggtacttagtcataaaatgttgtcattctcattatgtcattctgcaaaatcctctgtacatattgttaataataccgaactgtgtgagctcaccacaagttatatgaatgtatttggaaattattctaatagaagtaacttttaacatgtaatcccaagttttcctggccttttagaagtacctgcatacttctggactagatctaaggggcatgaccatttcttcattcattcatttattccaaaaacctactttgtactgaatatttggctaaatgattaagataacttgcacacatacacacagacacacacacacagacacacacacacagacacacacacacagacacacacacacacacacacacacgacctttacccatagaagaccacaatctggtgtggaggatgtgttagggagagagtcagaatctgagatgaacactttaatcatgagtgaggggaaattctgggcacaagaggctctgggcaccagctgagactgggagagacaaaagatcaaggaagaatctttatagactcggcacttgatgtgaaaaacgaaaactaagaagaaggagaagaggaaagagggagcccataaataaaggaattaggaaaagaaaagttgagtagggattgcgctggtgaggaagatatggaagggcaccccagagaggaggaagagcaggtgaagagcacatagcactaaacaatatgtgcacttggggaacagcacataggggtgcatggctggaggtaaggaggagagggcaggagatgagccaggggggcagatgtgaaggagcttgtgcaccatgctaaggagttgactttgatattgttgttgctggggaattgtgcaagaaagaccagatgtactgccataggaaagaactagttaattggaatgacaaatcaacaagtggtggtgctagcatttgggaccacaagattcctctacttgtgtatgaaccacctcttcagtcactaaatagagaagtgattccactctgcagtttcagagattccaggagatgtcaagcaaaacctttgctgttctcactgccctactttatacttggttgctaaattctgtgcaccctgagagaccctggtgtggtctctcaggtaccattcgaaaagtttctcttgctgtcccacttccagagtgaagaccaaacaatagctgcctttgtgtttgcctgcggatcatggctcagtaccttctcaagatacccaacgtcttgctcagaccgcattttgaatttgttatccttttaggttttcattgcattctccagagcatctttgtatatgatcttcctaatacccctgtgagagatgcagagcatctcacagatgtaggtattcattctataggaggttaaatggccaatgcaagatcacagcttaaagtatgtacagacctgggcctcagacatggagctcctacctcttagactagtgcttattttgctatggcacacttgctttatgatagagattacctcatagtgctgccagtgagttattctccaaagcataagttcatccacaaagctttcaataaactgtttactttggaatacttctagatttgcatagagttgtaaagataatgcagagagtttctgcataccttttacccagtgtctcccaacgttaacatcttacataactatgattcatttgccaaaactcagaagttaacattggcacattactattaactgaagtccagactttatttggattttaccagttttttccactaatgtcctttttctgtttccaggatccaatccaggatactgcattgcatttaacatccttaaagtttttaattatgcatggttgtggtatatggaagctgactgcttcacataagaggctttgaactggctagactggacaagagagagccagttctgtaaaagggaaaagtcttcctttcttaagtggaaaaaccattcagctttggaatataggggcaatatttccctcatcaaccctcctaggttgaatggctcccacaaggaagaacagagtcaaaatctgagttggtgatattaatatttatttgatgaatggcattacaggtagtctggctggccatggcccttgaaacacattatgcacataaaatacttcaaacctcatgtagatgtcattctccaatcccataaacaatgctttgtttgctagggcagcgattcagtgaaggccattatttggtgtaccttaagcttgtaggctgaactccaaatttaacaggaaggttaccaaataattcttaagtgcccttgaggagtttggcttccaaatgtgtgctttggtgtggtttgaaaaaaaaacaaatctttgatctgcaacaggaatgtaatttggggaaacgtgcaaaacttctgttgcctggatatctccaacccatctccttttgtagacttgatctattatgcattgaagtccattctaattactgtttcctatgcttgttccgatgtgctcaagaagacatttctaaaagttctcactttagagaaaagaggatctggctgtgtttgcatgagtatcaaacctctccaacttgcattgattgtctagcaaaccagatgtgtcttcctaacaggactagtagagtaactgagagagttaagaagttgtttaaaaaatacttcttggcaagagatcacattgattgtcttggaaaagaacaataggattaggacttgtcttgtacagttgccaaaggcaagcctatgcttatgtcacagggacagttaaacaactctataagtgacccatatgtgactagtgagtgtaaggattggcctagcataaaatgcctgtgaccactgacaaccagaatgcctagtggggaggggaagatgcaggccattgtccaggaggtcttatgcttttgtgacgccaagtaggtttctgtgcaaaagtgtttgagcgtcaccacgcatatacagttataaactgactacgtaatctaatggccaagtgccttcttagtctaatgtatcctcccacagagatttgctagctaaagacgcccctctgctctatggttgtcgccactctcactacacttccactacctccttgggtccagatgccttttatccattaaggaccaacatatgaactgcttcttccgtacaacctggtagatacctgtaaacagaagacattatttctcctctaaaatccacaaaaatcgctgtccatagctcttaggtgcacttttcactctctggtcatgtaagtaggtgtctaattccccctcataggataattaatttgtgcataggatgtttgtttaatttacctttatttagccccacagtgcttagcatgctacttggtacataccagcagttcaataactctctgaataaatagcacctggtttctgtagccagctgtggctagtaacggaataacctttgctttgctcattaacttatgactgaaatcatgaataataggaaggcctagtcacatgtctgattgaattcttataccattgttgcaaagactacttcatggagatattttccttggcccagtcaaccacagtgagaaaagataagcaggcaaccaaggaacacaaagagtcctcaagtcacttcttcttgatcttattatgaattctgagtggtgcaatgtatcctagtcaagttgcctcctctgggacataagtgtggaggaagcaagaacagtgatgcactaccaagccagagggaacaagaggaggatggcaaaacgtgtcagggccagggttccccttagggctagcatcgcttatgcactttcttgtccattttatggttttccaaggggagagggaggagtggtcacttgcttatgcatttttcgatcctagaagtctgggacttgtaaaagccattacttgagagcagctggggcaaatttaaacttttaacaaatgtttataatacctgttatgtgaccagccacatgccggacattgtgtgccatcagacctgcccactggcaatctcctgttgataagagtctatttggagagactctatcaacaggagatttccaatcatgtttctaaccaaagtgttggctgaactcaggagtattaagctgaaacatgccctgcattattgagaccacctttccttctcctgttaggtgcacctggataatctatattgtggcctatcctgggtgacacctatagtcccaacctctgtaatagatgcctctcctgggattttcatggaaaagaaaaatctgtttataaaatcgcgaaatcagcctgtgccctctatatctctgggaaaggtcctacctattaattcagccacattccgatgcctgacaactccttacacaaaggtcagtgggaaaaaatggttaccttggctgcactgaggacctgcaattttatggtcatttcagccaaaatataaggaactgatgtgttctttttttctagatgtggcccattttctgaaggataccaccatcaaaatactgtaaaataatgggggggtgcctgatggagtgatttggtccgaggttgatggtaataaaactggaacatccatcatgtttggcatgggttctggtcagcttccttgtttgaagtgtactgtctgtgcctagtggaaataatcaggttgccaacctgtgtttggaaagctgtgaagaaagcagctctttatgtacagatagacaggaaggcatgaagtgctctcagacattttctcaattttcctcttactgagtgtttttcccccctggaaaatgctttaatatccaattgataaggtcccaagtgaaatttacacatgaaagaagggagaacttctaataaaatgacattagaatcctttttttctcccagacacccttatgccatctctgattgaatggatttgaaaccgaagtaccacgcactttggggtggaaggaagcctaaaggccactccatccagtccttcatttgctgtttaaatccctctcacagtagccacacaggcagggttggtccaagactctaagtctatgattcttctgatgactgagggcttgctagcccaacagaaccatcaggtttggaagtgtacttaagctaataaaacagctttcaatgcacaagtcctcattaataataaaggctacttttttcaaatgtgcgtccctgtgctaagagcttgagagcttgacatgtaccaacttatactattcacagtgacctccaagggagatgctattactgccattttccagttaaagaaaccaaggcttaactaagtgagccaaagtgcttatctagtttattcacagatacctccagtgacagggaccatgcagttcttctccagccagctctgactctcagaaactgcttctctataaggtgtaatgtgtctccctataaatcaagcagtagttattaactgctaaaattctggcaccatgctaggcattttagatttaaacaaattatgggtgttatttgtatatttatatatatttcaccttattttaagagctatttggggaaaatagaaggaaacttctgatatataacaatggcaaaatataaataagattagagaagcaggatcagggaacgtgtaagtaaaattgaaaactatcatgaccagattaaaaatatactatacatattatatagaacaagaaagagtgcatcaatttatttcgtatttcacctggacttcctggcaaccaaaataaaatgggagacattgtcaattcacagttcttattaatcaaatgatcattaaaacggggtagccattttcttgaaatgaaattgtgagaaaactctctcataggatctcatatagagaatatcaagagatcctggtagctgtagcctcaacaaaatttctatagagtacatattaattatttagcacattgatacacttaggctctaatgcatcttttgttagaacccaagagcagaacattaaaataaacttggcaaaaagggcgatgtaggtcaaatatatagcctatgaactcccatctgtataccctaagaggaaagattctctgctactgctctcagtacttcacatatgacacctgatgtgtgcgtttcttttcctataacaattcagttctgtggcacacacgaactgggtgttctacaattaaactcaattctgacactatctacctggaaatagcatcagatcccacagttaagggctcagttgcacaatactgcccccacttaagatgtcaatctacatgttgtcacctgtgatttctgacccatcagctataatttcgaagttgccagtacccctcctcaggctcagtcacttactagaacagatcaaagaactcaggacaacagttttcttactaaattactggtttatattaaaagatagatacaaaaaggtttatacaaaaaggctgagtgtggtagcactttgggaggtctaggcaggcagatcacttgagcccaggagttcaagaccagcctgggaaacatggcgaaaccccgtctctactaaaaatacaaaaattagccgggcatggtggctcacagctgtagtcccagctacccgggaggctgaggcatgagaatcgcttgagccctgcaggcagtggttacagtgagccaagatcgcaccactgccctccagcctggatgacagagcaagattctgactcgaaactagataggtagataggtaggtaggtagatagatagatagatagatagatagatagataaagataagatacaactcaggaacacccagatggaaaagatgcataagacaagatataggggatgggcatgccaccctcccagcacctctatgtcttcagcaacctggaatctccctgaaccctgtccttttgggttttatggcagctttgtcatgtaggcatgattggccactggtgactaatttaaactccagcccctctctcctccctagaggtctggagagtggggctgagagtcccaatcacacagtttgttcctctggcaaccagccccccatgcttaggagcttcctaaagggcagtcattaatataaacgcaggtgtaattgaaaagggtatgttatgaacaataaaagatgatgattttgccttcattctcttatcccttctgaaattccaagggttttaggaactcagtaacagaaatggatgaagaccaaatatatatgtcttgttataaatcacaaaatcacttggaactggaggacattatgttgagtgaactaagccaggtgcagaaagacaaatatttaatatgtgggagctaaaacaaatcttgaactcatgcagatggagagtagaataatggctaccagaggctgggaagaatagtggggaggtggatataaagaggagatggttagtgggtacaaaaatacagttagatagaaggaataggatctaatgttcattggcacaataggggtgactatagttaataataatttattgtctatttcaaaataactaaaagaggagaaatggaatgttcctaacacagaaaaatggtaaatgcttggggtgatgcattttgatcactatatattgtatgtttgtatcaaaatatcacatgtaaaaatatataaataaaagaagataagttgtctaggccaaaaaattttaatatcccatctctcccctgaacaaaggcgtaaagcattacccctgacacaacgatcttcattatagctctcagctattgagacatatagacaggcctgagtcccaaaatataaatggtatgagtgtagagagtaggaactctctgtggttgggtgaagcaacccattcaatgcaggctgggactggaaggggctgtttccaggaagggttggccttcgtactgagctggactgaacaagcattgagaaaagatagacaaaagatgagtcaggctgaatgtaactgatttgatttattcctttcacttaaactgtgtaatgcctcagtttcatgtgtctacagaggacgctcacccttggcaccacctggaaagtgtaacagcagggcattgaggttctggccaaggagccatcagcaatcccattaccaatgcttaaagtgagtctcataaggcagatttggctccaagcaaaaaccacagctctattttcataaactaatttcacttgtttgccccagttaatattaataagcccagggctatatgcttctacttaccagagcacaaagataatagaataatagagtgttagatctgaaatggaccttggagatcttctagaccaacttctccatttgatagatgaggaaacaggtgtgaggaagtaaagagccaggtttcaggcagtgaaattcacagactagactggaacccaagttctctgacagggagccctgttcagggtttatcaggtctatcaaacatctttctctttctacctcatccctaaggactggaatgtggtggaaagaacgttggaccaggcaatgggagaaccaggatctaaacatatcttcattaattttaccttgaatttatctggcctcttatttcctcttcacagcatcaactttcttgtaaaagtggatgcctactactgttccccaaaggaagaggcaaggtaaaacaaagtctccacaatactagcaataccaaatgtggaacaaatcccagtggtagtgttacttggtgctctgtgactttggaacctaaagcttcactagaccgttgcaattactaagtgagtaaataaagcacatagcacaaaggcctggcactgagatgcccaccctcttcatggggctcctgtcttcttccttcctgatagatcatgtgtaagttcatatgtatctataagggacatgaattatccagaattccttatagtcagaatgtacagtgatataatgttcctgagttacttacccatttccactgggtaagtcagcttgcagaactcatttccgtttctcttcaactagccaaacatccattttcacctacatggaaacttctactggccttgggacaaataaatcacatttggagtgtcccaggacaatttagctttagaagaaagaaaaaaaaaaaacaaggatggtaacatgaaaggacgtttgctgtgttgggctgtcactaagtccccatcgaaactgtgaaaaattatggccaataaaataacatttttcaaaatgtgacactacccttaagtttatcttgggcaataaatgggttttaaaaagaatatttgagggctatccattcttcaagcactcaataacatatcataagttaattgcattattaatttataacagagtaattgttttgtctcaacagtcattttcacaagctctgacattcattttctcttcctttttaatcatctcaaaatattaacacttaaaccacccccaccatgccaccccagttgtccgcctcctcctacaaaatataaaaaatgattctgagggctgggcacagtggcttacgcctataatcccagcactttgggagactgtggcaggcggatcacgaggtcaggagttcaagaccagcctggccaatatggtgaaattccctctctactaaaaatacaaaaactagctgggcacagtggcacgcacctgtagtctcagcttcttgggaggctgaggaagaagaattgcttgaacctgggaggcggaggttgcagtgagctgagatggtgccactgcactccagcctgggcgacagagcgagactctgtctcaaaaaaaaaaaaaaaaagattctgacagttggcatgcataatcttctggccacccttttgtgataatgaaaagaataagaacaaaagcagctagtattgactgagtttgaagctctgcgaaacagtctactaaacagtttaactgcattacttcatttaatcttcccaacaatcctgtaaggtagatggcagtattatgcctattttacatgtgagggaattaaggcagagaatcattttctaaagccaaaacaaaaaaccatcctcaccatttatttggtgagggttcatgaatacagcttttcgtaggccagatttgcttaaataagaatgtgtttgagtgctgttcattctatataacacaaaatataaatatcatctttaattgtacccaagtctaagtagtgaaaggcagaggaaaattaagtaaaatacctattaagaccacaaaaactatgtcttcgggaatgaattttttttaaatgaatgatccagtttgggtactggtgtacattgtagtgttagaatgaccttattatgacatgtacaggcattgtgattgttttgttcctgaaaggtcagaacactaatgtgcaagcccaggctctgtcactatctgtgctgtgtccagtagttcacttcatctttctgaatctcaattatctcaactgtaaaagattggccctaatattccagtattcctagagtttttgttgataacaggatagacccaagaaactgtttacaagctaatcatgaagatgataaggggaagacagcccatttttaatgcccaagtttagatatagcaagactcagtcttgcatttcaacctgcctgaagggagaaccacacagttggacagcagagaggaaaagcccctatatgaaagcttaataataacaacaaccaaaaaagggcagtcttgaagcatcatgacactaaaagctcattaagatctctgtcccagctattacactcctaattgaacagttacacaaatagatgtacaatacaattgtgactctaattaaggctccgacctcagaatctagtcaaagcttgtacagttctcactccccctttaaatagctgttctgggcaagctctgggaagggaagctgttctattatgacttcactgaaataacatgaaaattcatacaagcgcttctttttcttttttacccaaaatacacctcccactctccatttctttcctttagcttctgggagtgtgatcctttggtaggagcggatgcaatttgccaatccagtagtgtctgccatattgctttcaacacttttctacagtgccctccatcagtgccttgatccacaagactaagggtctgagatagtctggtctgatactctcatgctaggatgctagcctccctctttactgggtaattggcttccttgcctaaattttagttttactttctcttgcccacttttccttgtccatctatacatctaagctaagaattttagcacataaacggttctgagattcccttagctttttcctctatcctcttgtcctgacctttgcaggcaagagggtactgttacctgtaagaggtaaccttgtgagaaggagtgaaaatcaaggacttcctttgaatcatggagagtccactgagttagaaaaattctaaaggaggaaaaaggtgggtaaagatttgtatatagcagatgttcataaagtgcccatttcctctcaccctgaactagttgccttagatgtgaatggaagatggtatattcatgggcaggagccatgataaaatctagagtgaatataatttgaacttaaagttgatcaccttcgtgaattattttccttgcatcctaaaactgaggactgtttttgaggctgctgcttaatatacctattgaggagagcccagtgaccttaggagtgtaatagctgggatagagatcttaatgaacttttagtgtcatgatgcttccaggacagagtaccttctgtccccttaagcctgagtggtatggccttctgcagggctatttaaatagaggcaagcttaacacaccaggacacttaatgtcaaattacacgaagaggaagaaggcagtttagagggacatctcgttccttggaatttttaaagagtatttattatgcttttaaaatgaagaatgagccaggcatggtggctcgcacctgtagtctcaggtactcgtgaggctaaggcagagagatcacttgagcccaggagttgaagaccagcctgggcaacatagtgagactcatctcaatcaatcagtcaatctatctataaaaaggtggagagtgactgtctgccttttgcttgacgaagagcatggtacagtagtcctcatcacaaccatgccacactggtgagccaccagctacctccagggttactctgaggacccaatgagcaaatacttataaaagcactttgaaaactgccttatcaatgtaagtggttgggtctacaaacatacccaattcctctagtgggatttgatctacaaaaatcaagagataagcacattttttttctgagatatgttattgacattaagccacctctcctgtctaacttaatggatggataatgctttatcagttgggacctacatgtgtgatttcctcatgcattgtcaattccaataaggatatatcatcatgaatggtttctttaggatccagttttattgctgacatcctcagtaacagccaaaaggtcgttttcagagatctaagctggagcatgatggtcaaggatacccctaaggactgtgtgcacatcattattaatggacttttcccaccatgttatttattggttgatgtatctgtcactcccagctgggacacaggggccttaaggagagagaatctcctgccccaggcctggcaacttctgggacgcagtggatggtcattaaatatttgaaaagagaaaggcagtgagggaaaataaaaggaagttccatggtgaatctccattaccctagcacacttcccctagcacacagtgggtgcccagtaagtgtacattgaattaatgcttttgatatctgtagtagccattttagaatgttgtacttacatgatactagaactaatgactgttacttgtttagtgtgtcacaattaagggaatttagcgaataaggctcaggatttttgtttcactttcttggatttcaacaatatctctatatctcattgggccatgaccgtgggttgatgttttatataggctttgcttaggctgttgtgttccttcatagtctagccaagaattcagccatcgtaaagggacagcatagtacgtgcttgcttatgctaaacgttgggtcaaatacacttcattctcagaaggtttgactgagagcccttattactgcaagcttgaggtttggcacaatctcgaaggtgtcaagtttctcgcaacttttgaccttgtgatgtacacttagattttccattgatgagaaaattatgcatctgctattagagaaatgactgcactctcttggattgggtggtatggtaaactataactggtgatgaacacatttggaatggtttgagaacacagatttggttttaggccccatctaaaggtttgcatggtcatctgaacttgactcatctgatctcaatccggaccattgagtcagaaacacaaagcttgaaacctcgagagggaagactcctgacatttctagtcatgccagcttcccatcaagccagccacattcgatgaagtgtcctcaggcattttggcacgtccagttctgttcccggtccaggttgtggtttctttgaaagcagcaggtgtaggtggtaggtgcatggaaagaggccactgaacttcaaggagtttatgtcagggatcggctgcagggctgaggagagagggttgcagcattcaccttcctcagctcgtttgctatgtcctcctggaggagagagaaattcagcaggaataactggatttcatcgggtaaattccacaaatattgattaagtattccccaccccaccctgttctggtgagtcttcagtgtggccacaaatcacataagaaacttgttaaactgaaaatttacagcctagacaagaaagtgagacccccatctctaaaaaaaaaaaaaaaagaaagaaagaaagaaagaaagaaaaaaaacccgggtgtcgtgttgctatagtctcaccaggctgagatgggacaatctcttgggcagtcccacgaagagactgcaatgagctatgattgtgccactgcactccagcctggatgacagagcaagaccctgtctcaaaaaaaaaaaaaaaaaaggcaaagaaaattcagattcagtaagtctggggtggagctcgagatctctgtacttctcacaaggtcccaaggtcccaaggtcccaaggtcccaggtgaggctgatgctgctaagccataagccacactttgagttgcaaggccccaggtgcaaagcgccatgccaaatatagggaacacaaaggtgaacagatgaagacgacaaagccattgtccttaggggatcatctcttggtgggaagacaggtaaacagtaaccattccacaggcacccctggtaaggatttaggtggatggatcctgtgggagccctgaactgggtcttagaggtgagcaggtgagcaagtaaggaagccagaccaagagtatttcaggcagaggcaagaacctaggtaaaaagagaaaccaaatgtaagctcaacgtctttctgtggagcagacacctaagaaattgcccaattcattcccaagcccccaggaaaaaaaaaaaaaaagatgaagcctatgaaagcacagaacattcctgtggcaagtaagcaatcacttatttccaagggcaccgggccttctttcggctgcacaatctaattagagcgtttgagatgtggattcgggagaagcaccaagctgagggtattgtaagccagctgaagctgtgaaaagtcgagcaatcccattctcagcactttttgcagccctgtctttcattttttgtggattgaccaaactgaggttttgctttgtgcttttgtgtgtgtgtgtgtgtgtgtgtgtgtgtgtgtattttctttctttttaatgaatctgaaaactcagagtgaaacccaggcaggtggtttgatttccccaggttctttcctctccttcctgctgcccacccctgcttcaccccatccccgctgtccctcccacccagaaatgagaccctttggcattgaatacactgcagatttcttctcccgcctgagctcatcactgacccatcagaccttctgaaccatactgggtgagtccaaacattgcagtccatcagttgcctgggagaaaatgtccctggtcttttttcttcactgcatgtgtcctgtcttggccctgccacttaccagtagaaagacccagaacgtgtttttgccataatgggaatagtaataacaaaaacttgcttagaagtgtacacagctctcacccacaagccttccacctatcctggcaaataattagggcaggtactagcatctttatttccatttcataagtacaagaactgagacccagggaaacacagctcatacatggtgaagcaaggccatggaccccgtgttctgactctccatagtaacgttatatactggccatgggcaacaggccctgcaataaccttcaattaatcctcatagcaacacaaacttcagaaaggaaactgaggcttagagagaccaaggtgctgtcctgaagtcagtgagttccaaacttgggttgcaaaccccagtgtgaccgatctcagagtcctcactcttaccctgatactgtgtagcttcttctgtcatcctcagcccttcagttcacctctcttggcctgactttctcatctgtgaaatggaggtggctggctgtgatctgtaagacctccttccagctctaatatcctgggatcctataattttgcctcagaaaccaaagttctttgttgccagcttctcttcggtactaatcattttgcttaattatgttgaactccaagtgagttttactgcagctgtcaacactctggagttggttacacggctgaagctgctagctggatgatagcacctgtgtgccattttgcagggcgtgtgcggcagccaggtaggccttctgcttggctggatgctttgaggctgagtcttgatgccagctgagttcctctgtttgtatgggaaaggagtaggcataccttcagctacaaatacccggaaagcaacatcagtcactttggctgagtgtacactgctggtttcattccaaagcctggcatgttgtgttgtgtggatggggtgttcaaggtggagagggcaaagactcaacatctgatacatttacttccatttggggtgcatgagcaaagatcatttcagtctcgggcttcttcgtgggaacttgacttgccgggtagctccccctggggttcagatctctgttcattgtttctcttcaagccctgggaagtgccatgttatctggaaagctttccctaacatgttctgtctgcatttatacttcacccatgtgcccctcaactattcatcatagcccttgtcccaccataatgaaaatgtctctcattatttttctggctggcccacgagcctgcaaggtccttataggtgccaactaagtatcattcatccctggatgctctcccactagacgtttattgaatgaagagtggaggaatgaatgaagcaacgatggcttcctctgtgctcatccttccagtgttctacgcacagattaggaacaagagtttcctttgtctttctgacattctcccattattcctcatccttcctcttttgatagactcaaggtttacccaattggtgaatctctcttctgagccttctcctaaactaatttgtccccagaatagcaccccttctccctctctgtccttaccaacacatgcttctgacagtccaggttccacctctgaaatgtcagctaaaactcttctcattcaggcagcgttccctgtccagaaaagaggcagcactttctctcttgctctatttgaattaaacatgcagttgccaggagtcacctgaattcacactctacagcatactctttcttcccccttgattcaagcatgatgtaaaatgttatacattttttttcaagttgtaaaagtattaattcatttgcatcgatgacttatctttgtcttgtaaatattttgataatatctaaggactcttctagttctaagaaaaaaaaaaaaaggtcagtgattctttaaaatcgtgatggatctcacctcttcaccccaagagattctattcaggagatctgctaccatgctttaaatcttaacaggtgagtggttggacaggaagagacctggaaaggtgaactctattcagtgttattacttgggggagggttgagaggaaaagaaaatattgagttgtggaaggcatctgaatggtttccaccttcagaagcaaaacgttctatgccacttaatagtggcctcaaatatgccaagaagatagttttacctgagctcttttcattgtcttttaacttttccttttccacttcatcagtttccccagttggtagggatgatcttcagatctgttcagggatgtggttgttgaggatggatcagcagggccaccatatttaacatgagtgggtttaaggatcccttgaggttgctgaaagtttagattcccaggcctttcatcacaattcctgattcagtatatatgaggttagcccagaaatctacactgtatttaatattagttcaatttaatgcataaatgctttttaaaaaaataagcaaacagggctgggtgcgatggctcacacctgtaatcccagcactttgggaggccgaggtggatggatcacgttgtcaggagttcgagaccagcctggctaacgtggtgaaaccccgtctctactgaaaatacaaaaattagccgggagtggtggcgggcgcctgtgcagctactcaggaggctgaggcaggagaatcgcttaaatccgggaggcggaggctgcagtgagctgagattgcaccaccgcaaaatccagcctgggcgacagagcgagacttagtttcattaaataaataaataaataaataaaagcaaacactgcaagagaataaataataaagtgtaagggtccacacattcaccctctggtatctgagtcacattttacctgcacaaaggcagagtaaactcagacactgcctctaattctgctgttgtcctccctcataagtgtatgactaaatatgaccagtttcaccaagtggaataatactgctctggtcttgtctcctcaacatggctctgtgtagctatagagaacagaagcacctggggagtgagtcagaagttatgcaggcgcctatacaatctgtcatgtggtttccatgttactgtaaaagttgatcctaagctttagctgttctgctaagctgtgtctctccatctagtttgcaacatgaaaggccaggagacgtctcattcctttgatacccagtgttccaggaaactttaaagtacagatttctcccacatcttaccaaattggctgtgtctcccaagaagttatatgcgggctaataaagcaaacagtgccgagagcatcccccatgtggtcagccacacagacaagcacaatcgtaagctctgcccagcctctgagcctgtcagctcctttcagttactgtgcgatgctcaaaatgactaccagcatcttctccagacctgtttaacagggacaggcacagaactttagaaggaaaacccacattgctatgttgggcgattctgagtttggagtagtggtgattcaatgattgatttccttctggaaaggaaggaggccaatactttaaactgccaaagtatcattcatgcctcgtcctcgatgtttggcaggtttaaacatcaaatactttattacctaagtaattgaaaaatgccaattgccttgagctagagaacacttggagggaccaatatcacatgctaatattccagtgacttttagggataatcatcataagtatttgttatttatgtatttctgttgctaggaagcttagctgaagtgctacaagttgctaattttgtttctgatacctactaaaggccatattcagccatatgttcatgtgtgtgctgtgtgccttggtttatttcctttagtgttttatatatcaacccaacgaaatagttctgcatgtagcattttgcagattctgtttatcatcaacagcaaaaatttttctccctggatggcctaaatacagaaaaacaacgttacctcagagtggataggagtagagattttctcagggataatggatgatattactagctaataataataatgattcaagttatttttgtatttgaattcgaactatgtttgtatttgtattgtacctgatcatttatttttatttatttatttatttatttgagatggagtctcgctgtcgccaggctggagtgcagtggtgcaatcttggctcactgcaatctctgcctcctgggttcaagcgattctccagcctcagcctcccaagtagctgggcctacagatgcgcaccaccatgcccagctaatttttgtatttttagtggagatggggtttcaccatgttggtcaggatggtctcgatctcttcacctcgtgatccacctgccttggcctcccaaagttctgggattacaggagtaagccaccacgccccactgtacctgatcatttactaagaacttttccggtgtttttcctcacatttaatctttactgggaccttgtgcagtaggtattaaagtcattaaatttccagatgaaaacattgcggaattacagtacaaggatggtaaaagattttataatattgtccatcaaatagggacaacaattgagatttgaatgcaggtctatctgactccaagtccagtgttcttccagttcttcctatatttaaattctcctgaaattcaacaaattagttagtggcatggttgcccttgctgggccacaatgattggaatattaatggaaccacatggctagctccctgcacttgtatcaaggcctgtccaggtatatctggagccagtttccaaattcaaagggttgtcatgagatgttttaatcgctattttctccttcctttttgatgtcttcttgttggcagtggtatagccatttgttacgcacccaattaagtcagcaatcttgtagtcttttgtagaatgtggaaacttctcgttttatgccttgtgactctgcttcatggaaccgacaagagagatggcggaaaaggttacagtcactccatttctctattatcgtcttctgctgagagcttatcactaattttggtgtcagagcaacagtcattttgagaccttatgaaagcctacatactccccagcaatgcagacagcccccctgacctttgcggctgcagataatggccaaggctgtggcacagtgacctttaggccaagagtgggtggcagcactttcttttctgtgacattcattttgctttgcctctgtttgtatttttaattggaagcgtgtaccgtgtggatctgcctggttctccccctccgccctgaactctgagcagagagattgtgtctggctggctctcgttataaaggaatgctctcaatgccaagctgggggtcattactaattgccacagcgacagacacaaaggatattaccggcaatctttcagggggagatgctgtcagcagaagagggcctttgtcccacctggaccagcccatgtttccttctcatattcattttactcccatgatcccatgagatgaatcaggcacttgaatttttttttttcaaatgacattatttattgcaccagaaatcttgtcatccgagaggaaccacagccatttaggccatctcttcaagctccatctccagtccttgtccttgatgatactgtttgctgcagactcaccccacatccttcatttcccttccaggctgcagacagcttgagcctattctaaaggtctcattatttattctacttagttctttattatttgctaactataaaatattcccaggttgctttctgtatgttcatcttgtttcctcagatagctttttttcactacttgtcaaagcgaagctgactatgaaaatttcataagcacctacggtgtgccaggacctatggtaggtattttatgtatatagtttcatttaatccttacaacaaacctgcaacttaggagttgttatcctcactttatagacacgggactggagcttataggcactgtgaacattacaaacttgccaagcatcacgcacagctgtgcagctggcccataccaaggcaggatgccaacccctggacatgggttggggaaaggtgggaagaggctcaaagcatgtatgatgttagctcctataagcctccaaacatggactaccttacccttgtgtcacccacccgaccacgccagacacatcgttggtattcaataagaacacccatgatggtgtccttaaacatgatgctcttctggctgaatcacatagggacaggccctgcactgaggttcaagcgctggtgtgccatcggggcagggatccctctgacagggcctgtcagggattgtgaaattggaaaaagtcacaatagtgttgcttgttccccagctcgctcagtaaatactttacaatgtgggcacacatggataccttggagacttgatggggaacatggccggggaatcctgcccttcagggagctgagacattatcagcacacacttcctacttcctcagaaccatccagtgatccggaagaaaagttctcagaacttacgtcattggtagagtaagctttttgacaaaagctggaggaagaaaactattgtggggaaaaaaaaaaaatctctctctctctctcacccacccactcactcatacacacacacactctctctcacacacacacacacacatataatattgccataaaccaaagccacagaattgtctttaagaaaggacagtttatggtaaatgccaagatttacatggcaaaaggaagcaagtgccaaggtttacctccttcccctattcaaaattgctttttattttcagcaaactcagagtaggaggtagcaggttttctcctactttgagtggtatgatttggatagcctgggacctagaacaccccagcaccctgggacctcacatgtcctccccactctccaggcacctggctgccaacacatgcaaccccgttgaggcctttcacgctcacacccaggggccctaatgtgtcagaggaatggagcagttttgccttcttgcacagaaggaactgcatctccaaggtggcaggatccacacataagattgtggaagcggctgacaaggtgctgtcatcttagaagaaaattgtgcttttatgttctgcagacttttgaaatccagctcctgctcataaattgccgtgtagccatgtcaaggattatggagggtttttctatttatgtgtgtatatgtacatcgttgctcctgatgactcaagcggtggtgctagcagggaagcttggtccacctcgcaaagcgcttaacaagagtcctgacaacagcaatatgttaccacttttgtttgtactgcatcttcacacccactcactcagcaacagactgaatgaaatgtgctccggtgctttgtgtgagggaaaaagaatgaaaataatggccattcaggcaaaataaggctttttggtgcttttcagaaagcagtcttgttttcgttgttgtccctgtgttcacgtaatggccttatccttgtctttcattgaaacattcccaaagcaaggaaaacatctcaccctgaacacagaagaatgcatgctcttaaagtgatcagcagggaagacgtgggctgggaggatgctgcaccagttgtctacagggctccctgctcagagcaagttgatgggcaggtgactatggatgggaaaggggcttgctggaaaccagctctgctctgtctggcaaggccttaagagggggaaaacatgatcatcaccatcaatgtgcacatgaattgggcacttaccatgcaccaggcacaggagagggtgtctcttaggcatcatataatctgctccaaaccctctcaggaggatatcattattatccccattttagagatgaggaacccaaagtctagagaggtcaagtaacctccccaggagtcatgtggagtcaggatttgaatcgggtaccatctgaccccccgcttaaacatcacaccagcatcttaaacactaccttaatatcctcagaatcaaacctcccatgcctgcaaattagaggggttgagtcatggatgaggaggggaatttcagggaggtatactttgagaactgttccaaagagggttgttctaagttcccttgctggctcatctttgggctggaggagctgcatgttatttcgaccctaaacatgtgagaggcagaatgagtgagggcatcagcctggattcaggtctggatttcttgggaccagctccatgaacacggactgttgattctcctccctgggatttggcagcctgtgcgttagctataccgccatgcttgttaaaatgaccacagggctggaaaattatctatgtcttccctgctcctgcatctttccagggagtcctcttcatgatgacgtctcattagttgctcatttctgtttctctcaatgacaggaaacccactggagccacaggggcctttgagacgcacctcactagccctgaagagattcttccctttgtgtgcaagatgcctcctcctctattctcaggccatccacatcccaccaaccctgatgggcccaactgaaatcccacctcctcaacaaaaccatccttgtgtacatgtttcttcccagctccacattcagagacatcgcaatggtagcttgaaatcaatcactgtaggaatatttacaccacagaaattggcaaacattgcaaatcagacccttatcttcgctgttgttttgcaggctggtttatcagcacatcactgctcatacctaaagccccaccactcgtttggccccaacaattaaaaccatactttggccatgttttatgatgtgcccatgcttgtctctcagtggagactgtaggaggatcatcaagttatttgtatctccacagcatcatcatggtacctcgtaaatagcaagtattgtccaatatctgtatctgtcaatgttgtccgtttcatctattaatatttggggtgtactttttccctaaaagttttcagatgatatccaattggctataagtgaatgtttcaaagagctacttgtctgtcatgcctttcttcattcaaccatttatttataccagtgagcatttgctatgtgtcaggcattagttcaaaggcaagagtactcagaggtaatcataacataggaggtctctgccctaggggagctcacattctagtcaggagagacagaaaatacacaagtaaacaaatccacaaagaaattagaaacagtctgatagcagcaaaggatacaaaaagaagaacccagaaggatggaatagaggagctggggcatgggtggggcacagtctcaggttgggaggtatattgatttcctattgctgctataacaaataaccacaaatgttttggcttagaacaatatgaatgtattctgtcattgtcctagaggtcacaagtctaaaattggttgtgatatggtttggatttatgtcccggtccaaatctcatgctgaatgataaccccctttgttggagtaggggcctagtgggaggtgaacagattatgagtggatttccctcttgctattctcacgatagtgagtgagttctcatgagatctggttgtttaaaagtgtgtggcatctcccccttcactctctctctctcctgctccaccacgtaagacgtacctgcttccccttcaccttttgccatgatcgtaagtttcctgaggcctccccagccatgcttcatgtacagcctgtggaaccatgagccaattaaaccccctctctttataaattacgcagtgtcaggtagttctctgtagcaatgtgagaaaggactaacacaggttggagtcctgcattccttctgaaggcttcagggaagaatcgtatcttgggcttttccagctcctggaagccacctgcattccttggctcatggccctgcatctctccaatttctgcttctgtcatcacacctccctctctgactccccttcctccctctttttcccttatgaggactcttgtgatcatatggggcccacatggataacccaggatcatctccccatctcaaaattcttcctcctttgagtctcttttgccatgtaaggtagcatattcacaggttccagggattaggaggtgacatctttgggggccattattcttcctaccacaggaggtgagggaaggcttctcccaggagctgccacttgagaggagacccacacgacaaaaacagatgagggggacaggctgcaaagatcctggacctggcagaagcctgcagattctgaggaaaatgccagcatgactgaagtgagcagcaagcgggggctggagggggaggcagggcccaggtccctctgcattgcgggagccagagaaggagcgcagatttcattctgagtgcagtggaacgtgggcagagggctggagagttgtgttctcactgggctaacttgtacatggatgaagacagtttctctggcagttgtttagagcagtgctgtctggtagaaatacaatgtaatcagatttgtcagtttagatgttctagtagccacatgttaagaagtaaaaggaaacagctgaaattaaccttaataaaacattttatctttacccaatctatccaaagtattatcatttcaacgtggtatcaatatggaaaacttattaatacgatattttatattcatttttgtaccacatcttcaatatctagtgtgggttttatgcttgaagcatacctcaatttggactggccatatttcaagtgctcgacagctacatatggttggtggctacttttggatagtacatgtctaggcactgttctcagaatccagtgcaaagtctactcaaaggtgttcagaaaagcaatgaacagtgcattgtcacggaacatatgggccacctgtcactcccatcagccatccccaattccagaggttctgagtaggccacaggaagtaggggatggaacaggagattctagaaaggatgtgtcctctggtgaagctgatgaggttcagccacagactctgattagactcttgcctggctgcaacctccgagaaacaccctgtctctgtttatttcatagatatctaagttcacctctgcgttcacccttatacctttaatcctcaagggagtttcagccaaagcccgatttttttcccatttctttatagatagggccatttattcaactcattatactaatattactgaaaacaagggcagaggttaagaacaggaaaaattcaatgaagcaatgagagggtatcaattgctaggacaagaagtatattccaggcacttttaagctatacccatgctctcttgagctcttgctgtgaccctgatattaaccataaaagtatagcccaaaaagcttggtaccaaaagagcatcatgtatatccatttagatttttacagtgatattaaaaggggttatgaaacagaaaataaagatctgaattaaacatttaggtcatggtggttttgcataaagtctagtatgtgagaagcatattcgatactgcacaagacaataaaaacaatagcaatgtttattagaatatcctatttagaaccagcaatctgtgcaacatactcagcttttaggagatgggctggccccgagtttctttccgatgatggatttggtgggctggcatcttgaccctgtcatccagcctgcgggtaccatcaaaaggcagcttgaccatttttgatatgtagtgacaaaagctctaatgtgtgagtacaaaggtgccttctgtgagtgctttggtgctttagcgcttcagtcaaattaccagtggctctaattagtgttcctgaaatctggagcaatctatatctgcattccaaaaaggggtggaatgtttccctctgataacacattagtatgagtccttcctagatgggtgttctgaaattataaggacgtgatagtgtggaggagaagcagttacgatagagaaacctgttgctttgaaaatcagcagtgatctttgcaatcagctgattaataaatatttatacagtacctatcaagtgctacactctgaaaaaaataagtatgcaatgataaatcacagtacgggcaccaatgtggttctgacctggaagcgagtagacctgagccctgacagccacttacgattgctgctatctttggtttaatcattgtatagcagagacaatagttattgtctcaaccaagattcatttccctaggacaagttactttatctctctggacctcaagattaagagggtctgaagggatcatgctggtggtggtaataaaaatagcttcacagctgggcgcggtggctcacgcctgtaatcccagcactttgggagcccgaggggagcggatcacgaggtcaggagattgagaccatcctggctaacaaggtgaaaccccgtctctactaaaaatacaaaaattagccgggtgtggtggcaggcacctgtagtccctgctactcgggaagctgaggtaggagaatggtgtgaacccgggaggcggaggttgcagtgagcggagatcgcaccactgcactgcagcctgggcgacagagcaagactccatctcaaacaagcaaacaaaaaaatggcttcacatactgaggtgtataattgtgctaagtactttaatgcgaattaactcatatatttctaaagcaaactcaactagaagatgggttctgttagtcccaatttataaatgagaaagctgagatttaggttgtgtgacttacctgaaatcaaagaacaccgactaatgccagagctgagattcagtagcaagttttagagcctgtaaagcttccaatcggcacccccggaagctcatcccagctgtcacattctgtggatctggggaccttaaagaatcatcaaaagattgcctggggaaacgaaaaggttgaaaactgatgggggaaaccatatttcagggaaatagggacgaggcattagcagagcttcagagaggagaaacataccatcgtctgtggctcagagaattcagaacctaactacatcagaataccgtgatgctgaaatgcagtgtgtctttctgggacacacaccgataaatcaatgctgagatctcaatttgtgttgacgtagtgatggtcattcagcaaatgagccttcacatagcaggcagtgccacccggaaaggcacttcaaggttgctgtatgacaactagtctcaccttctcaaccttttcattttataccagtgtcagccacagctggaggacttgtgaatttcactttaactataatatttagtgaggacacacacacacacactcacacactggcacccacaaagtcttcactttgaaacaagggtgggtttggtttccttcacttatacaactgatgcctaccagggatatttttgtttagacggctcattggccacaaaccgtttcattatgtgttgcccagttaccttggcttcctgcacattcttttgagcagatagttcatctccttatctcaaagaattgtttccccaagtgtagccctggagccaatagctttgataccatcgaggcaagaaggcattaaaccaccttttttgtaattgtcttagtcttactttttcatgtctgtttcatgaaaagttgatgtggttagatttaagctgggcctcgctgagggtatcatctgtgcctggggttacccacatcatcacgtggcttaccttcctttgcagtatggtgatcttatcttctttgctgcttcttgccatagagcaaccagctccttctagctcctatgtgtgtgtgcatgcatacaagtgtgcattcgacatgcgtggaggcttgctcgtggcagcagcttgtaaaatgacactttaccattcagaatgaaaactggctggttgggggcctttgctatactcttaggggcaaacgacaacaacaacaacaacaactccttcattggcttttccatttgggaacttggagcaaagttttccttaagtagatgcatttctgtgtagtttaaagtagtaattcttttgttccctctgtgtcccagtaactgagctgacaacccagggtacaaagatgaatatgactgagtcactgtccttgagagagcctcaggacagccataggagaaaacatgttaacaaatagctagaattcaactcaggaagggcagagaggtgccaggaacagagttctctgggaagacaagtgaggggactaggagagaagagccagaggaggctatgaaaaggagcaggcatttaaactccatcctcaaagtcaagtgcaggtttgccagttaaagaggggaagatattcctggtggagagaataaccaaaaaaaaagtaaatgaagatgtgaaagtgtgggctatgtttcctgtgccctgagcagagtaggtatattagggtgaggctgtagaaagatgggccagcccagctgaggaaggacttagtgcattatcctgagatgtttagcattcagggtatgctttaagattcaatccaacaagtgcaccagagacccaggaaaagcaaaaagagacattcacggaccttgccaaaatggagaactttgccttccccagcaagacagggctgtgccagccgttctgtccctggttctgactcagcctttggctttcttttcatcagtcatttaaccctccgagaacctggcttgccacggtcagagtgtgaatcttgaaagcgtccttgacccctcctgacaactgtaaagtcatgggaagaattgctcttgtaactcatcttgcccttgggcagctagtggacatttgaccatgacacgtgtaacaagaacagttggtttgtgtggctgcagcagccacatcacagggagagggaaagagctctccgcctgggagaaaaggccttgggaactgtgtgggctctaccactctgatactgaatgaccttggacaagttatttctctccaggctccgatgtcctcacctgtaaaatgaggtacctggactttatggctactaagaggccttttctcccttctaccgtgtctgattctgccttgactctttaatttttaggaagttagagtgcaggagactgaccagggagcgtctctgcttaacatggggactctgagatttgtgcatgtttgtgctttgagcaaggaaaaaacaaatcaccaagtggcccagcgaggttgttccttcttccatttccttgcagcagaacagcagggggagggagagcggcagaacccagcttcttggctgagtagatcttgggtttggacatttggagaattaccttaggaatggagtttcacgaggggtgtggtgggtgaacgagaagggtggacagagaaagaggctgctgcaggatgcagagaaagagcccacgtttcaaatgaatacagccagccccagctcttccaccacccactctcactcagcagatgtggcgggctggcactcactgcccatctacttgaagcttcctgggctgcgtgtcttctttatccacccgatcttctactttgaaggctgagaactttcagctcatatggattgaggacttcttagagctcctctgccccaggcaccagtttgggtttgggagggggtgaccatgacagcccaggacctgtgtggagggtcgggggaggggtgtgacagcagcacagggcatccgttcaggtagaaggggcagtgaaggggtcaagagcatgggttttgacatcataagatctgcagtccaatgctcaccactgaccactgacccactgtcagccttctgaagctgcttcatctctacaggcctgaaaatggaaagtgcaagtaatgaaacttcatgtaggactcttgtgagaactaactcaggaagcaatgcttaacgctgtatctgatgtgtactaagtggcccataaatcataaatggtagctttgaaaatatctattatgattaatgctttgaacagtaagttagggtcaagatgtagaagtttctgtttgctgagactaggtatttggactttatcctgcagcccatgggcagccaaggaagatattcctgcagggatgatattaaataaattgctgtttggggaaatcttcacctgtcatcagtttggggagaaaggaggaatgttggcaaggaggctctgtcagtatccaagcaaagtggacgacggccctggggtggtagagaagggaagggggtggaaaacacaaattcgtgaactttagaaaggaagatggctgaggagcaagggatgggtcagcttggcaaccacagagaaggaagaaggggtcaaagatatgttttgagaaggcatccgtgatggcagtgacccaaactgtagtgcgaggggaggagagacagtgctgttctctctcctgggggaaggccaccatctgggatcactggacccaggtcccacgcccccaagggcactgcttggcacattgattcatttgtatcctgcttttctcaaaaaggtttgaggctgttttacaccagatacagtggatggtttctactttcctcacaagtgacaatgagctgaaactgtgacaaccaaaaaaaaggagataaagggcggagcacaacatcatgacggggaggagagaacgagggcagaaaatggactgaccaggtgtgtggaggggtgttggctccacctgtccacttgtggccttcgaattattccatcatttctaatccactccctttgcgagggaggaatccctccaggaaaaacagaaaaaccaggtctttctcaatagcatttttactcttcctttcctgtgcaatgtcagaagcaatggcaggggcctccttctccagaaccaatacagcccccaagaaaggagagagagagagggagagagaaaacaagaaagagccacagaaagggagagagagacagagagagcccattgccagtaggcactgccaggcgagctgctggttggatggctgtggccgcggcagccacaggacgatccaaattgtggctttgcttcctctctctttctctttggtagcacacaatcactcagccctagattcctctgtgtttcatacccaggaggtcagggagggcaccttgtagtgcctgaggccccgagagggttcacagccacctgagaagtgtttgcagtctatgggtgtgtgttctttctccaagctgtgtcagctgtgggatggcgtggagagaaaacaagaaaaagttgtttccctcagctctctgctgaaaaaatgctcacggggagtcagtcaacatttggtaagtacgctgaatgtttttactttcaatgcctaaatttctctggcttccgtaaggtatcgttgtcgaggaaggaggtggtattgtcgctaccctccctccccgtgtggtgtgacagcagagatagttatctctacacccaactcagtgttgctttttttgggtaacagctttcgaaaaactatcgcctgggctccagctggtcaggcttcgatggcagttgccacagtgccaggcaggatgctttgtcagtcaggctgccgggccacggagacaggattaggggataatgaaggcatcctccccttgtcacaaaccagaagctaagccccccattcctgggatgtccagagaggctgggtaagaagatgtgctgtgaacacagagctcattcgctcttctcctccttcagcctagcagtggcgggacacatgcagtgtccctctctggagggaaaaggcagctgagcaaacatctcactctcttgattcttttctaaatgggactcctgaggtccagagtcctgaaccatctttcccagagccaagcctctgctggtgagagtggggacagggttctatgagtcatggctgcaaatccattgtctggagacttctggttaagggcaaaaggcctggcttcacagccacagatctgaatcaaatcttgcctaagaacctggggaattttgccttcacctggccccatgttgagctctcaatctccaccaggcctgtgtcagagccctctggggcaggtgcagaggacactggctgagaggaccaggcaccagaggaataggcatccttcctttccctctgatgagccctccgagtcaaaagtggaccacccaagaaacaggctgtcaaaggaaacctagttctcatactaaggcagcaagtgaggtgaaccccagaaacagttctaattgctgctgcagacccaggtctcttcctccctctgagagccatcttaggcccaattctacacactcagaccccgcccatcatcacagcttttatcccttggctgttcccagactctccctccagcccctgcctgctacccacaacagggcgtaactcttacttcctcctccagtctcggcatctgccttctctatttacattttaaaatgtttttatttaaataggcaaacagcaaagatctaagagcacctactagatgccagccttcatactagacactccatacctgcacatagacatatatgatatatgcacatatacataagcatgggattttatttcctcccatgcttctggtgcctgtaagtgaacacaggacagggccactgtgtctcacaactccatggggagtcattcaccgtgtaggctgtacactgtgctctagccagtgccagtctcatggaatacaatggtgctctctggagttacaaactcattatacctaccctggttcctctctgccacgtgcactgtacagatgtgcattgatataatgcagtgagtaagggtgtgattgctgaactccaggcagacttgcattcaagtttgagctagactatcaatatgctgtgtggctttctgtgaggtatttaatcactctgagcttcctaggagatattaggttggtgtaaaagtaatttcgttttttgccattaaaagtaatgcatttatttttagtgtggtttgataaattaagtaaagaaatacaaatgagattattcagtgaggtacataaatggtcaatatgtaatttcaattattatcatcatctttaatgtgattattgtttagtcaaaattgtcattatattcattaagggtacaatatattaatactattcttacaatgcctgacacgtaagcacttaaaaaatatatgttgaggccaggcgcggtggctcacgcctgtaatcgcagcactttgggaggccgaggcaggtggatcacgaggccaggagatcaagactatcctggctaacacggtgaaaccctgtctctactaaaaaaatacaaaaaaaaatttagccaggtgggtgtggtggcgggcgcctgtagtcccagctattcaggaggctgaggcaggagaatggcgtgaacccaggaggcggagcttgcagtgaggagagatcgcgccactgcactccagcctgagtgacagagtgagacaccctctgaaaaaaaaaaaaagtatatgtgtgtgtgtgtgtgtgtgtgtgtgtgtgtgtgtgtgtgtgtgttgaatgaatgttttgaaggatgaccaggtggaaagccaaatgctcccttgaaaggaaaagaagaaaattgtctgggggaactgagttaaacccagaagacactgaagtttttaacatgattttggttaaaccatgtgccctggaaactgaaagcagggagggaaatcttgaactggccacactttttgatacctacaaataaaagacgccattacgtctggtgtgagtggggttccccatgaacctactgtggcttctgccacttttttttctaaagaaaacttcagaaagaggggtctttcagtctggaggtttcaggtcaagtctcatcttgcacagagacagagtggcagccctgcaccacagaggctggccccatggcccggtgacctgctgcctgtctgcttggacagcataccctcagtggggcaggtggcaggatgttcctctttcccatgccagacatctggatgtctggaaacagctggagagctttttccctttctgttccagatgtttggtgctatgtggtcatagagtaaaatccccagcccaggccatgtctgggtcaacaaattacacctgttttctagggttgttggtagataaagcagactctaaggtctggtgtggaacagcatgctggagagtaggggtggcagaaacaataggatagaggtctaagggggtagggaacacagctcatcccaccacttgggatggctcgagtggatctcagaggcagtaagaacagagtctgtattcagagaaggacttggaagccaagccttgaaggatctggatggtccactacgctcctcttcatgggatagagccgggttgttcatttctaaaagccccttctcaagtattttcagacgttttctctgccagctcccatgctaggcaacaaggacacagacatgaaggaggcagctcttgtccttcaggctgtaccttcacatgccaaatgcctgcatgcaaagcggacaactcaattgctcccagaggtgtccaaatatccaggtttttgttttttttttctggcaacctgagaagaaacaatcagatgctaacttgtttagtggagccgtttatgatttcacagcggatgaagacagtaaggactgtgtccccggtgagctctttagcgggggaaatggtgcacaaggctgtgttcaacagggaaaccaagggcaaggctacaggccagcctgagacatgacttagagtgggtgcgcccctacactccaaacaggctccccatggaaggcagggcaggaggtggcgattttcttgctttgtgtttttcacatgtggaacttgtagtacctgctaccaagcctgagcctgtattgacgtgtgcaaggaggggtgaggttggcagtgtgctgcgtgcgcattgattgatatatgtgcatccttcttgcttcgtaattattaaagccccacctgtagaggagctggtgttcgccaagcttcatttcacatctggaatcacctcaatcaaataggcttcatttttttcctagtcagttgctttttctaatttgatatattgacacaaacataggaaatatgggaaagaaaatgaataagaaagaaagagtttcagtgacaggaaggaagggccaaagacaaagttcaagagggccttaaaagtcaacgagggggtgcggcatgatggctcatgcctataatcccagcactttgggaggctgaggtgggaggatctcttgagcccaggagtttgagatcagcctgggcaacttagcaagaccccatatctacaaaaaaaaaaaaaaggtcaaggtatgaatatgaattttgtatgtgagcatgagtttagggagccactgaaggatttttcaacagggaaaggccctggtcagatttgctatgtagaagcattgctggctgcaatgtacacaagaatgtgggctggtgcctaagagtaaagcaaaagacatggacagcctaacctaggagagtaaaggtgggagggcagaggggggagctgattggaggatattttaggagagagctcatggagtattcagtgactaatggacatgagctatgatgaagagggctgatggtagagattctcagctttcctgcaggggttaaatggaggcgtctccagctaagacggaaaacctgggaaacagtaggttaggcaagaaggctgagtttgattctgacaatgctatgtctggagtccccgctgaacgtgtgggtggaagtgttcagggagccatcggagagggagcttagacccagggagagctctgcttagagattgatgctggggattttcttagtgtccagggaaagtgtggagcatgggatgaccagcctactgctcaaggaagcctgtgggaccttcacttctggacaggcagagagggaggagtctgtggcaaggataaagaatggtccgagaaattcaaggacaaccagtgtccttgaatttacatctcttctccttctgtcattgtacaagttttaaaaaatccagagcaagacggaagttccttttttttgtctcctctctccatctgcacataaagcaatgtggccagcccagatctttgagggatgtttcaagccacatcatagtcctgcctgggggtgctcttttcccacggaatgacatttacgccagcacatgctgactaacggtacaccacatagactagactttcggctaaatgccatctatttcaaaaacaaaccaagtttgcatgtaaactgttgtgaccaatgcttaaccataagaaatatgcctgtcactggtggacaccctaaaagaggtcagtgtaatgaagtaagtaagtgatcgggcaacactctaggtattcatgtatgccttgagtatcgcagaacttgagttttgcagacaaaaacaaataccagggaagctatttgtttttaaatcagtaataagttttcatatcaatgccaattcttggaggtaaggtgaattaataatattttctggctttagagttgaatcaaatgacagaggccagtcatctacttggttgcatgtcagaatagtaaaccaaagcagaggatcgtaacgattcaatagcttgagttcaaatgtacaaataagctactgaggagtttggacagggaagtaagagtcaaagacctggatcaaggctcccacaccccatcctcagactcttcacctgtaaaatagagatggtcataacctgaaatcacgattgccatgagagttatatgtgtatggaaactgctttgtgatgtgaagtgagttgggcacaggtcgttttcactggtgtctcacattctggggaagacttcacttttaggtatatctcctggctctggaaggccaatcagagagctgatggtgtttctgtaggttctgtttttgaaatctttggtccacacagtttttgcttaccctcttcgttttagtaacgtcagaaagattatatgattgactgatagaacaccagcaacccagagagatattgtaccatggccccaggctatactttccatttttattaaaattcttattaactcatagcccaagagcttttaagccaagcctgatctcctttagggccccttgatttgatcagagcaatttgtgtgcagtgttctggtcccactttgtgcagatgcagccaagacagcagccaaattatgttattctgaagtgactggggtgtctctcccttcaaaaccactttcccttacaataccactgctacccggtcttgtagacacttgagcttcacaattacaagtccacgttctgtgtttaagaacctccaatccctttaaagctctaaatatatctaggaaacataactactaatcatttataattcagtgatgccgagcttgtcgactcctattctgaaaacaaagatagtttttttttggagggaaaaaaaaaatcctgcgaagatgagggtcctgaaggaaaatatactattgcagtgtgagaggggaaaaggggaacaagcaaggaaaactcgaggcattgggcctaggtctcagcattgtcgaggggtcgctgtgtcactctcagatgcgaacaaaatgacttcccctcaacaaatgcgcagcccctcatcgggggatggaagtaggtccattgggctgctgggcaaatctgcatctgaattcttcccccatgggctttgtgatgctttttatccttcagttggtgtttgcttaagtggcctcactgaatttctcacatttatcattccattaacaggcagtcttaagcttaatatcatcaccttggtaatctgccaaactagagagcacctgaaaatagcaactctctttgcagcttgctgagtagaagccacttctttcttggcatcctaggacatatctggggccattttgatttttactcgtgttcatgtcaaggtatggagcacacggacttgaggctgagaagggtggtgccgctgttcacaggaactaaccttggatctgtagcattattgacttagactttattaccatgaattaaggagtcatttagcttttaaaaccactcagaaatgaaaacatgagagtaaggttcaaggttgcccctgaactggggtttgagacctcagtttgacatgtaccgctattttgtgccttctttgcatttgaaggagatgtccaggcagagacttttctatgcagttttataatatttgaggaactgttatttttaccttttttcctcatccattgtacaaagatttatggggctgtcattcactacatccccagcactgtggtaagcatgctagggctgtccagtgggacattagagaaaggatagcttctgaagaacaattagcatggctaaggtgcttactggttgatgatgtattcctatagtgtccagttctcacaacctcatggtgcaaaggcagaggagttataatcaccgtcacattataaatgaggaaactgacatccaaggccacccaagaggcaagtcttggaacccagacttcagtccagatcttctaactcctaagctatgttctctcaaccactcttcctccctggatcttagaacctttccagagatacaagacttaaatacatgaaaaagacagtacaaagatattagtaattatatgccaaattcatagaggtgttgccagattccagaaaaggatgaaatcatggtaacaaaaaacggtaaaggagattgggcttggtgggtttggtgaacttaagggaaaagagaagagttttttaactggagagtagcaaatgagaaagggacatagaaaggaaggacccaggaagaagactcatttggaatcgggtgggatgtaatctgtaatcccagcactttgggaggccgaggcaggtggatcacttggggtcaggagtttgagatcagcctggtcaacgtggtgaaaccccatctctactaaaaatacaaaaattagccaggcgtggtggtgcatgcctgtaatcccagctactgaggaggctgaggcaggagaatcacttgaacctgggaggtggaggttgcagtaagtgaagatagcaccactgcactccagcctgggcagcagagtgagactccgtcttaataaaaaatacaaataaaaaaagaagactcggctgggcatggtggtcatgcctgtaatcccagcattttgagaggccgaggcgggcggatcatgaggtcaggagttcgagaccatcctggctaacacggtgaaaccctgtctctactaaaaatacaaaaaattagccgggcatggtggtgggcgcctgtagtcccagctactcaggaggctgaggcaggagaatggcatgaacctgggaggcggagcttgcagtgagccgagatcacgccactgcactccagcctgggcgacacagtgagactccgtctcaaaaaaaaaaagaacactcagttgggatggaacagaaggttagatgggacgaggagaaggctggatggcgggagacacagtgtaggcatggtaacagcaggagagaaatgccaggtaaagcctcggacttcagtcctataaaattgcccaacattttttcctcaacaaaatgtgacagatgatgtttttgggaatgacacttttcctctggcatatttaaattttgatgaatcgactctccaccccacctccattttttttttcatcagcaaggtaaactatgcaattagatacattagtttgggtatagatgtctaagagtatgctacaaacctcaaaaattagtagtttaaacaacatggaaattgatttgtcctttacatcgaagtctgagctggagtaacagttgtgctccatgaagctggcagggtcccaggcttctcctgtctttcttggggtctgcctttatttgcatgttcaaggtggctcaccaccaagtccatactccaggaaataggctgaggaaagagggaaatggggaggtaggtgactaatatcccagttttgcccagactaccggatttcccaggacacaggactcttaatgctaaaaccaggaaaattcctggcaaactggaggggtggtgtgggataggcttgggagtgcagattgtcagcctcattctagggccccacctgaaagttgtgtgcttcatttgtagttacatctcattttctagaattttgtcaccaagttgcactaagctgcaagaaaggatggaaaatatggtctttattctggctatggaagaaggggataatagatattgagccacagctagctgtctttgcgataacatacaaatttttttgttggtcgagagaagagttagcaggcattcgtgtggctgatggtgctgtatccgtaaatgcagctcagcagacactgtcccagaaggtcaggttgtaggctttgtgtacctcctaccatattagctgccacttcacctttttcccaatttaggaggcatatctgagagtgatgttttataggggcaaccttgaaccttactcgcttgtttttaaaagtattaatcagccacaagtatttcttctgacatcctcagaattgattgcaacataccattttggccagacacagacactaaggtgcattccagtaggtcaccggaatggttttgagttcaagagtcgtgaaatgacgtgatgaaaaagcacttgagaaagattcatctggagagtgtggtgtctctctccctcaactcaaaatacccaaatgaggtggggacaaatgcatggatatggtgttttgtattaaaatattatcagagctatataactgtgagcttctaggagactcacctatagcaaatgtaaggacctgcctcagacctgacctccagggaagattttccattgaagtggccaatgagcagcccagaaatagctttctaggagagatgtctgttgtgtgtcctttgctattaggaggtagtatccactctcaagctgggatgtcaggagagaatgagccagaggacacaggtgtgaccactgagtcgtgagggtgacccctgcgaggcataccatcccatctttgtcctggctgttctggagtgagctctccatgtaacctcccctcattagaagtttcaatagaccctgtcaaatgctccagcttcaaggcaaagaagactggattggaaaaggatgagacccagggagtgaaagagaatacagtaacatttggaaactagttgttcattagaagagagcggaagacacagcttatttaatgttccccaaactgtaaaggcccttcatctgcttctctttcactatcgcctctccaggtattctcagtctcctcgctgactatacaagtgcatagctgtgtgtctatgttgaattggggtttctctttttgatggatccacacacatacacacacacacgtgcatgcacacacatatatttttagcaacaacactttactgtagagaactaaaatatttctgttccattaaattgaggtgtggtccctcatgcccaagaaaatcttgagtgttttgtgaatcaactagacacttgccatgtgtttctcatcacattctgtgcctgttttcttgtgtaccctagagcctccaattttaagagaataaacattccaaagccattagtatgcttgtatgaattagtagctttgaggaggaaaaagctggagatgagatccagccatacttgaaacagcttttcttgcctggaagtacttgtcatattgtaaaagttttcaatctgcatcagccactaagacagttacagaagccagggaacaatttcagttgtgtagtgatttagggatttattaaggacaataaatctgccttagttaagaatcgaagagctataatataatattatgcagcgattaagtgtaacattttcaaagaatatttaatgatgtggtaaaatgctcacgatataatgttaagtggaaaaatcaatatctaaaactgcatctgcagcatgatcccaattttgtaaatttttatatacagaaaaaaacagtggcagaaaattatccaaaatgttaacagagtttgtgagattgtggacaagttttggtttattccttaagctgatctgtattttcccacattttctaaataaataattctttcttctatttgaatgccaatacatattacaattataaataaagttttttatttttaaaaagaataagcgcaaaactactatttaaaaaatgggtgaaggtatggatggaagtagatattttctacaaaaatccaagacaaatggtatgactcctcacctttgagtgagttctaacacaaagtcatgtgctcagtgggatatctttaaagttgtttgttcatttatttgtttattcattcattactcagagctatttgttgtgctcccactgtatgccaagcacagtgctaaactaagtaaagcctaggtcaccatgagaagactacagtacagtagggagacattaactactgctaagacagtatgttaattgtcttctggtgttgtgaataaagtatgtgttcactgaagacattaataaatgtgtgaatttaccaatgaacggaagccagagatcatcaccagcactggccttttattccggagttttctggtgctctgtgagatttcttccatctcctggtaggaatctcaagtgtctgggccctaccctttcagcggattgcttcataaaatgacaatggctcatggaagaactgacaaactctttccatgtgctgtcctggcgagcttataccatgtaaggaacagatgactctggaaggagtcactggtggaggcctccagatgtgtgaagtttcttcctagtcaatgtggggatcctgtgggactagaactcaagctagagatgtggccagacaactattttttggcagaatcgggcccatgtggaggtggaagttaaaacctctaagacgtgacctcaaaggtcctgaaaaggccctctgtcaccctcactgccccctgctcactgatacagggactgaggagggaatcgtccatcccggtgagatgtagagttgaacaggccggtgctccgggcagcagtgacctgctgaattccattagccctaaggtataaataaatgccagtggggatgaagccttcctgctgcaaaactcctggaggcatctcctgtctccaggctggcagcagtccaggtaagcgaaggtgaggcttgaaccagagtgggccagaagaaaggcatctcctccctgataggttcttactgaatgctctgtctgactggttctctcactggctccaaggcatcactccccccgacccatggggtgtgcaaaacttcttctgaaagttttagggggagagggacacctgatgtcttctttgcaggatttctggaaacccttaaatgatctaagtaaatgagcaactctttggatattgcaagatgaaagtaaatgagttgccctgagaccataatgaatgcaaatgaattctgcacctttacagaggtttgagagagcctagagaactactggtggagagccgttgtctgatcatgagagagaatcaaaatcaatgggaatcaggaagaagagagagaaggaaaatgtaaagaggtggtccttagagaagctattaacgaagacttgacttttattactttcttccgaaggttataaagaaatatcccgtatggtttctgccccagtgcctcccaggagctttctctttgagggtcacagaggccccatgcgcctgaaccaggcagagtggtgcactctcccctgtgtgggggctttcagagggtgtgtcctctccacactcagcggcctcagtcactagccacccagagatgctggaaatgaacagacccccacactgtagctaaatccagactttacgtgcactagagtgtcttcacttccccttcccttcccttgtcctcctcatagattctctttccttctggagccctttgaagtactttgggcccaacccaagactttctctacctggaactgattactagattggcagggccaccttcttcacctaccatgtctctttacttgcctgcgccaggctgagacactgagtcaaggctgaaaggatagggaagggtgctgcctctcctgaccctgactttcccaccagcagcactccctcctgctcctcacagctaccgccactccctcatagctgtctcctcaagtgtcagctccctgcccgcctcctgccttataccttttccaggtgcagtgcccaccactcctggcattgcctgttcttcaccctagtgaccctcttcaatgaaatgtccaacatagttggtactagtttttctctgatatgtacacgaatctgtcttacttcatccagtactaattgagcaccaaatacatgccaaccactataccaggggttactaacatgaatgagcggttatacctggctgtctataaaacatctcaaacagtagttgtcatcgttttttgacagctgtaatggtcctgactgctataaaggagtcttcaagaatcctttataggattggaactggaagcagcaataatcagcagccccaggctcacgcggagcaaacatccatacatgcagctggcctcttcccagggacccgcacaggcagctgctcacccaacccagattcctcaggagccccctctctcccaggaggcagctccaacacccgccatgtcccagcagcaggaatctggggtcctggccttccaagctggttgtctgaacacagtttcccttggaagcctggccatgcagtgtggttcagggataccctttaggagtacacttcaattacattatggttataaaacatattttttcagactgtcctctgggaacataaccactcttcataactttgtgtttctggggaaaagtttccaaataacaaataaacaaatgagttcattttggatttttttacgtgccagacattttcttagcagccctaaagctcctgttctttcaagactcaatttccacgagctaacgcattgtttgaagtcatttacgtttggaaagcattgggttaatatgtgactttcaaaagtaatatatgtgtattttagcagagccttctgacagaacagtgcctcagccctgaaaaagaaaaaagaatttctccccatagctgtaatggaggggacctcaggtagatactaagcaagtcagtaatagaaacattgggaagaggggcttggggcactctgaagtcatacactttgaatctgatacccagtacatgtagaaatggcgttaatattgtttttcaactgggcttaatgttatactcctacaagaacttgatattatactcacatcacggagggctttggtatacccactaagatgctgctaattctaaaatgttactgaaagttatggagtttccagactccaattatatacctttccctttctgagattgtcttagggtttaggaactaaacctgaagacagtaaatatcttaagcttggaatttgatgggaaggaaaagaacaggtgtgtctttaaaaaaaaaagagagagagagagagagagagagggagagagagagagagagagagagagcaggtagaataatgtccccaggccaggaaagtaccagtcattttcagataaattataccctcctcctcctccatgggaaaaaaaaaaaatcatactcagacttaactgtccctttggcacttttgtcaaatgagttttagtagcaggagctgctaaaaatataagccaatttctttcttcatttaaatcaagtgcttaaaaaaagtgtagcgcctagaactggtgcaggactcagcattgcaatggcctgggctgcctcagtccctgaatagtcctcagtgatagcaagggccctctctgagctaagggaagtcagcagccaggctggaaattgccccttgagaacaggggttgtttttagcacccgggacccaagttgaaaaggtgcccttggggatatgctgaccaggtcaggtgtggaaaatactctcagtagtaatttctggtttgttcattcattaatcctgcctttcttcttttttccttttttctttccttccttctaaaagaaaagaaaatgtaaaaagtgccaagcatgtgccagtactaggacatgatttatggccatgaatgagacatagttcctactgttgggtagactgggatccactccatccccatccagtgttcctttcccatagggcctgtggcttcctcatatttggaaagcggtctgaccaattggccctgcctaaggtgagaactagtgaaggcttaaattgttttcagagttacctgccttttcatagaatttaaagccttttaagaatttaaaagggctttgaagcccaaaggaatatatttataatgctagaatttcaggaactgtgataggaagaaggggagagagtttttcagtaaggatactcttcatgttattctggatggccgctgcttgttctgcccaataatcagacaaggtacatctaaactatacctactaaagacaatcttagattcaaatgttagaagtggaaagatgttagaaattagctaacccaattcctgtatgtcacagaagaggaggttctgggagagtcaggctgctggggtaccagttcgctgttcttcggggccatgctttgtgtgaaggggaaggtggcatcacagcacgtgaaggatggagacggaagatggggaagcaggcctacttggtgctgactgtgtatatgctaggatttcactataatgcctctggttcttgaccttgggacttataaatgaggccatcttgaatcaaaccctctatggaacttcagtgattcaaaccaacctcctgaatgagactctaagatagctttgccatagttcaaattctggtctctgatgaatagtgaatatagttattaatgtcacagtgacttccacagaatcactacatcatttctactgctctgcctatcaaacctgactttcctgtatgataattgcattaatgccttctctgtgcttgggtggtgtgaacatagaagtacttagcatgtgctctgaggtgtggttctagaagcagtgatggattgtggccagccatctccactacactttcttctggttctgctcggtaacagtggcacaagaatttagaaggtgccctggttgacaacagatacctctgatgccacggcacaggaaagatagcaactgattcaaattaggatgaaccctatacttttctcctaccaacaatgctctcatcacttgaggtaagtcccaggtatcagcagtaggcagctctagaagttcctagccatacagtcctacgttagcccatttggactgtctttatgatattttatattccattatgaagtcactgctgtgaccttttccacaaccattaggttattttgtccttggccagctgttattctgtcctctagcagatttgcagttcattttaggtggtcttttggataagtaaatagatcttaatgggagattgcatgggtgtgagttgagattaggtttggtttccaatgagagctaactcttctatagcatttcttatgaaactttacaaaaatcacctcacttaatcttcacagcaacaatcgtacgagtgaggaattattattagccccattttatagatggggaaactgagacaaaggaaggttatataatttgtccatagtcgcacagctgttaaatggcagaagatgagatttgaatccagctagtctgatttaatcactacagcatatggccatgagcacaccaagttttgaaacatggattttattactgaatgtaacaccccagttcctggcactttaggagtttttttttttttaataagggaagatgtctatgaaaagagccagttgtcttctgtcagcaaaacgatatttaaagctcaaagagataattgtgtctcctcatttgaacccccaaatcatatccaagaacaaagtttgttttgacttcatagattagacctcttctccacacaaggactaggggaaaatgttgactacattaacttccaagagcctggttgaatcaagaatgtttgcaagtcccaaacctcttcctcattcacaaagatcctcctgattatggcagcccatagtgtgctctcctcatgcagatctcttccttggaactcccctgaacctaaattaggaaaggggatctgccagctcacatatatgcatgcattccaccggcctgtgtgttgggaataacacttcactacttattaacttatgttatccttcttataattctacttcaataagctccactttcccaacaaacttgaaggccataaaccatgttttaaactttattatttctccaaaaaaaatgtattaatatgctggccacccccaagatgtatttaataaatatttagggacttgacctaaagaagcagtaggattttaggcgaagccacacttatggccaaagttgttacattgatttttttttttaatttcttatcagcacctgctgtttttatttatttatttttggtgttttcttttttctggtaacttgtctaaaaaaaattcctagttacctactccagtaagctaaacttccttatttctggggaagataaagtgcctattacatatgcttgtgttctgtctctataaggctacagcaatgaattccaaaaaatgaaaaattcagacatctgtcttgcctatatgcacctaatgtctatccatccatttgttgattatgtgtattgagtgcccactgtgtgccaggcatgaggtgtgctgagtaacacaacatgtgtggcctctatccatgaagcctaccatctgaggttgggaggaggcaaaggatataaaataaacaagtgtataatttcacatcctgctaagtgttatgaaaactaacaatagagtgctatgagagaaaataacagggaaagcctgtggtggcttacacctgtactcctagcacttcaggtggctgaggtaggaggattgcctgagcccaggagtttgagattgcagtgagctatgactgcaccattgcactccagccttggtgacagtttgaaaccctgtctcagaaaggaagggaggaaggaaggaagaggaggaaaggaagggagaaaatgaaagaaaggaagggagaaaaaaagaaagagagagagagagagagagaaagagaagaatgaaggaaggaaagaaggaaggaaggaagggagggaggggaggggagggagagagaaagagagggaaggaaggaaggaaaggggagggaagaaaggatggaagaaaagaagaaaggaaggaaagatgggaaagaaagaaagaaaataatgaagggtacctaatgtagaatttggattctaacacgtttccaggtgacactgctaatttggatggaagacatttcacttgccttatgaattagcttagcatatattagaatcacctggagccagggggtggtgcctttaaacgaaatactgatgcctggccccactcccagagattctgttagcatttgtccgggcctgaccctgggcatcagcatttttaaaggcagctaatgcgcatgctaggtggtgccagaaagcgtggtgctgattgctgagcactggctagtgtatacatcctggggtgcttcaccacccagatgctgattcacacactcaacagtcagcctcgttgtggggagcattgccttcttctgaggtggatctcacaaatccccagttgcaatgtgagcctgtaactctacccacctgtcatatgaaagaactggatctggatggacctgcttgccttgcatttgagctccagtgtggagcgtttccactgaggttaaatcatggacggttggactgtctgtacctgacctgggaagctgggatgggagagtggtggggaatgggctggctcatgggtctgtgttagtgtagctggagttaggagagccaggttcatttccagttctgctctggtgaagtagagaccttggcaagtcatagcactccttgggctacaacttcttcctttgcaaaatgaggctcttgaactaggagataactatgcttcttttaaacgatcaaattctggcaatttcagttgtggaagtaagagtgaaattgaaccccaattttccctttgataaaataagagttttaccatttaccaccaaaccttgtttcattgctctcaccctcagtttctctagcaatacaatcagggtttggactacacagtgtatatattttttttagttctaaaattccgtgcttctgtgaatactgctactcattgctttattcagatttcctttatttattcagcaaactttgagtttttagtatgaggctcaggagtcagactgcctggattccaatcctcagctgaccacatgctagctgtgtgactttgatcgaattacctaaaccctttggcctcattgctctcacttattcacatgggattaataaaactggggctcttgtagagtgattgtgaggatagagtagcatagcaagtattgcacaaaggagtatcttgcacctagtgcaatgcctgccacatagtaagcactcagtaaatgtttttatcagtaccatcaggccccacactagttgctacggatgcaaagatgagtaagacacagtccttggcatcatagagcttacaacctaggcagggaggagaaagagatacaaatcactagaatatgatgtgaaatgacaaaagtgtgttcccagcctttgaggaatacagaggagagataggggataaaagtggtgagttactagtcacgtggaagcctttgagccactttgggtggtgaaaggaagaaggagcaggctcttaatgcgagccctaccttctggaggacttaaggggaccacaggcgccaggacacgggcagcagatggagcggacccagtgcagagcgtaggggctagaagccccggatccaaacagccaaggggacaagagtcagcactgaaagggaacagcacacagcagggagacggaaagaggctatggcaagggggagttggctaagtagagcacacactgcagccaatgatcagtgaacctggaggcactggaggcatctccagtggaagatggatcccttgtacagcctaactggccctgttacctggtggaaggagccaatgttggccaaggtcctaggccctacagctggaaataggtaattggtgacacctggcataggtgaggtatcctctggcagtgggacagccacagttcctggtggtgttcccttccagagagtctagaagcatagaattgcagagctggggtggggggtgggggttagagatcaaccaccccatttacagatccctgtaccacaaccagaatccttcagggaaggactttggaatctgcattttaagcagcttcactcatagttctctcatctgtagtctgtgactgcactttgagagacattgtgagatactatatagtcaagggaacctcagtaatgaaaaaccaagactaagccgacggattgaaaattagaagttgggacctccagatctgccgtttttacggtttaggggaaacctgtgttgttttcctcaaagtttcctgaaggacccattcacctgccacctccacccccacccctctgcctttactcccagtgtgaaagctataggccaagagggtagcatttagctttaaaatgtttaaaaattttacagaaaagagaatgcgccttttttccctcaaatcttaaaccttcttcacgcaatgcaggcctcattttcaccagcccttttcctatgttttacataaaaatatagaaggtttaatcaagggtctgtccgtttcttcaagacctccaacacccttaaagctagggtgagggggattttcctgtctcttccttcctttcaaccccttgaaagacaacacctgatactgtccaatcttaaaacttaagggaactggcttagagctttgattggtggtgtttacctacctttgggttaaaaaaaataggcaactttcaaaacacgtgctagaacctgtgctgaacaaagagaaaccctgtaaattccctgaaccaccctcacgtgatgggaggtggagtgcagcgtcctgacttgcagcctcactcgtcagcctgtcccaatcgactagtttcccaatcaaagatagcagggaaggcttttcaaacttctgtggcccaggggaggaccgcgtgcacacgcatgaacacttttagtttgggatgttagggagaggcgtggttgtgtgagagacagctccttccagactgccctggggcatctgcaggggtggagatgctggccctggaagcaggcagggaagcaggcaggatcggttcagaacacagggattcacttaaggagcctccctcttgcctgattgggatgcagggtcctcactctgagacagggcagaggggccggccatgagttccacccatgaaaaagcaacccgtgtgtgtgtgtgtgtgtgtgtgtgtgtgtgtgtgtgtgtgtgtgtgtctgggtttgacttcagtccaggagtgatattcccaaagcactagggagccccttactggaattcaaccatccactcaggtccgaggaaaaaggaggaagctcgtactgcattcctcccacccaacagacgagccccagcctccgaagggcgccagcagcagagatgctgtggaaatgtctctagagaaatctcacagaagcctgtaagaaacttgacctcatttgcattttctgattgaatcactgataggtttttagttctctcccttccctttacaaaggcaggcccaggaatgaagaaaaggctaagttacctagtattttcaggagagatgtattatcactgattgtcaacctggttctcttacacatggtgtttcgaagccttgactaattccatagcggatgtgtgtctgtatagtgttatttaaaaatctttcttcttttcttgtacatcatggtttcatgaaaagttcaacagcatcagagcatactcctgaagcatttattagttaacggaatcttcatcctcattatggtggtgaaggaatttctttcaaggactacagttccagtaatagcataaatcaaagacaagactgttgcttgctctgctcgagatttttgtttttaatctcatgccccagagggaggggatatttagatgtagaaaaccagagagtgagaccaagttatttagctgtcagtaatggtctgggctgctggaatctattcattatcgtcagggaggctttaagataggcaaacagtggtgtagagtttgttcttcaacatgcctcttggccttcctttggctggttttgcaaaagtccagcagcactattctctctgcctgccccaaaccatcgtggaaaatattgctgtgacaaggaaatagcaagtttcgtgctgggcttatgtacacagggctcagaaacatgtacctaatcataggaaagacaaaccaagagccaaagaaaatcagttcaattcattgtcctactgatgaaagatagaaatccttgttttttaatctttcatgcaaaagcaagaatccactcttcaaagtgcagcatttagctgtgtgctaagtttctttttcttcttagttattaattactgcctttctcttctgcatcccaaagagaagggacctttgaaggctctagagtcccaaaggaagaacacttcatcctggttataaatgggcaaggtgggattcaaacacatgctggttctgcattgggctttgccactttgctgtgtgactttgtgcaaggtactccacctctctgagcttctttgtcttcctctgttaaatgtagcttgaattcctgtctaataaggtatgaggaataaaaggaaatcatatatgtaaataattctaacgggtttctccttccctcttcacttctcttatgtggaaaattcctgaaaaataaaatttaaggatgattttattttttgcattttaacatattattattaggttggcacaaaagtaattgcagtttttgccattaaaggtaatagcaaaaactgcaataacttttgcaccaacctaaatagaatcctgtacttgttccttgatttcattttagtctctccccatccaaatatccctctttctctctcactttgccttgttcctaatccctctcactcacagtatttctctctctcctttcaaagaatctacttccttttctttttcatttcttcatccgtattactcacctgtgactggcataaaagagggtagggaaggattagcattaaaatcagggcattgagtaaaagaaaatagtatataagagagaaaagaaaactgtatccttgtattcattcagtgaatattgatgaagcacctactgtgtgcagacccagggcccaagactgacatacttcatgcctgcacagagtatatgagcaaacctggaagtaagcaggtaggtatgattctctctgccaagtgatttggcacaggggacaaacacagggtgttttgggtgcaccctagaggggcctcagcccacacatgggaaggcagtaacgtgtacctgggaactagaggtaaagacacgggagaaagggctggccaggctaggagcaaggtgtgtcagggcgccaaggagagattggacctggtgttactgaagaaacaaaagcccaggatggagacaggaggaataagttctggtgttgtattgcacaggtgcacagcctggggactatagttaatagtaatgtattatatacagacatacatcatcttattgcaccgctttacagatactgcatatttttacacattgaaggtttgttgcaagcctgcctcgatgaagtctgtcagcaccatttttccaaaagcatgtgctcacttcatgtttctgtgtcagctttttagcaataaagtattttagacataatgctattgcacacttaatagaatgcagtatagtctaaacataacttttcgatgcactgagaaaccaaaaaaattgtgtgacttgatggcgatatttgctttattgccgtggtctagagaccgaacccacaatctctccgacatttgcctgtacttcaaaattgctaaaaaattagattttaaatgttctcactgcaaagaaatgataagtctgtgaggtgatgatatgttcatttcacaatgcatacgtgtatcataaccaccacattgtacaccataaatatatactattattatttgtcaatgaaatataaaacttttttaagggtagaaaataatatattttgcaaatggcaatcataacaaagctagaatgcatacactactaacagaaaaaagtatcatttaaaacagaaaatgtgactacatataaaaggagacattttaaaacaataaaaatgttaacccattagaaaaacataacaattataaacatatagcacctaataacagagcttccaaatgcaagaagatagctggagacttcaacactacactttattttattttattttattttttttattatactttaagttttagggtacatgtgcacaacgtgcaggtttgttacatatgtatacatgtgccatgttggtgtgctgcaccctttaactcatcatttaacatataaaatatatactgtttacagtatataaatacatatactgtttacagtatataaatacatatactgtttacagtatataaatacatatactgtttacagtatataaatacatatactgtttacagtatataaatacatatactgtttacagtatataaatacatatactgtttacagtatataaatacatatactgtttacagtatataaatacatatactgtttacagtatataaatacatatactgtttacagtatataaatacatatactgtttacagtatataaatacatatactgtttacagtatataaatacatatactgtttacagtatataaatacatatactgtttacagtatataaatacatatactgtttacagtatataaatacatatactgtttacagtatataaatacatatactgtttacagtatataaatacatatactgtttacagtatataaatacatatactgtttacagtatataaatacatatactgtttacagtatataaatacatatactgtttacagtatacatatactgtttatagtatataaatacatatagtttttatagtatatatactatatatagtatataaatacttatactgtttatagtatatatatactatttatagtaaataaatacatatactatttatagtatatatacactatttatagtatatatacactatagtttataaatatatacactatagtatataaatagtataaatatagtttatatagtttatagtatataaatagtgtaaatatatactattattgtcaatgaaatataaaattttttttaaaagatcagaatggaggaacagagtgcaagggagggggcatctaaagatgagctggagggctctgcacacctcggggggtgttgactggactctaatgaagagccaaggggagccggtggaagtaagtggtggcggggcagggagggtgggcaatggtggtcagatctgtgatttcagcacctggctctggctgcagtgggggaagctgggtctgcttatcttttctctgtgcctatctttccacgtttgtaagttgggcccttagagttgccaagtcctcggctgtgaaaacaagccactttgttcaagttcagtgctgtcagtggtccagcaaattgagattgaaagaggtcccccttggccaggcgctgttttaaggactctgctgagggtttaaacggactagttttgaaatgtaagacaaaccataatcaccaggcaatgctcccttgttttgccagggagagacatttataggtattaaactagttccagaaggcctctaatacagttccttaaatgcaataataacacagaattattaggggaaactattattattattccaagtaataacataattttgtgcccatggaggacatccaaagtgctgagagaaatgagcattggttaattaaacctggccactcctccacaagttgggtgaagcatcattagactcgtttttatagaggagtcaaactgaaacacagttggattagttgacttccttaaggtcaaaccgtgggaaaaaaaacctgggggtttttatgtttgatcaaccctttcgcctcatgtgtcctacttttgaacatggattcagattcacctagtgcctaggcaaagaataaacctacagggttgagaaaccctagagaccctggtcctaccttcctcaccccagggttgaggacgggctggagatgagaagcacccagaagcaatcctaatacatgtgccctttatttctccatactctcatgggcctttatgcacagagagaagctgataggtaatgatgccaaggacagtgctttggaggaaaatcacagcactggttgaaaatggcaaacaaagccaggtaaggtggggagggaaatggaaggacagagaggccactattttcaggagcttcctcttctgatggcaggagtttgaagcccagcaattcctcagcatccactggtgcagcccctttcctctcttccatccattttcttcggcttggattcaagcttggaaaaaatatcccggggactatgttgggcatcttaggaagctgtgctctctcttcatttattattttattccatgaatatttaactcatattaggaactgcactagacactggagatacagtagaataaggcttaattcctaccctcaggaagctccatctggaaagagaaaaagataccatagatccccttcgcctctcccacttccacccaaaatcagcatccttagcatatgattcatgcttcagtacaggagagtcacatgcagaacgccttgaagaacgctggctaattctgcctggggagttggagaaagttttggggaggagccaaggttggtctgagaactaagagaaagtccttctgggcaaaaggaacagcctgagtaagggcatggagacatgacactgtaggaggcttggaagccatataaaaagttaagtcttcattatgtgacattgttcctttggactagaagagctaaattagtccctaataatatattctctcataatcttcatagattgttttatgatatgtagtatgcctttttatccaaatagattatatgttattcaagttctaagaccttgttctcccccataacatggaactaagcaggactgagtatccgacatttacctaaaagacaaagaaaaaggtgaaattaacacaagttttgatcttaaatgtgatgcttcagttctctgagccttgattttctattatataaaattatgataattatgctatttctcaggattatttcaaagataaaataaggcaacacaggtaaaagtactttgtaaactatactgtaatattgctcttattacatttgatctgataggtaattataataaagatatagtattctgtagtagtttttactccctcaactgtggccagttagactctaagttcagccacacaacgtatgctaagatttcaatggcaggctgatgggaagatgggcaaaggttacaattaagtggggctcattttgaagactagattttagtcaacagattccagaccccattcagcactggggtggagctcctaacacattacctgcctagattctcactattttgaagcctaagagagctaagcacacagatttcaagactttgccacccatacacttcgtgggacgtgagcaaacacagcccgtcatgcacaaccgtgagcactcaatgaagatacagaaaggtgttccctggagaaagcagctgggcgtccagatagaactccacaaagcgagtggcctgcaatggtctctgccctcaccaacctgtctgctcttcctgggcagagaggatatggtatttcccagtcccctcattcctgggttggggccgtgaggctgagtcctggcaaatgggatgtaaatggacaggatacaagtcctagttcttctgtctctctttctctcctatggtgcctttggaggcaggatgttgcagatggcagagaaacaagatagagaaagaccaccgatctgcatcagacctgatggaatcaagaaataaagctttttctgtaagctactgagaggtagagatttgttatcatagggcacagcctcttctgaccagcacagtcccgttgccttggtggtgtcactatagttcagaaactggcagtgtccttttttattacaatgataggacatgccccttctggatgatgttcacctatccaatgtccagattccatcacttacactgcattagagctctctgacctaatacctccttcaacctgactttctgtatttctgctcaaacctgctaggtgctgaatttacagttgaactctcagacgacactgctacttctcttctatcacagtggacaaggagggagtgtctctggtctccttaagccacttaatacatatttattgatgttattcctaagtccttaaaaatatgagatgacaacatctactgagctctttctttgtgccagtcactggggaatttgctttctccacatattatttcattcactcttctttatttattgatttatttatttttagacacagggcctcagtctgttgcccaggctggagtgcagtggcatgatcatggctgactgcagccttgaactcctaggctatagcaattcttccacctcagcctcctcagtagctaggactacagatacacgccactgtgcctgtctaattttaaaaatatatatatttgtagagatggggtctcagtatgttgctcaggctggtctcaaactcctgggcttaagcattcctcccacctcatcctcccaaagtaatgggattacaggtgtgaggcaccgcaccttgctttcatttaattttcacaataaacttacaggttaagtactattgttgtttccattttatagatggagaaattaaggcacagagtggttaagcagattttctggggtcaaacaaagggaagcagagattcaaatctaggtagtgtgatcagagatgccatgcttataaacacgtgatgcttccccacaatgtgcacagttcttaaaaactaaagaatgctactgcttgattcaactttgggatttttaataattagaaaactttgccatttcaccgttaaaataatgaatatgaaaatgattcaacttgcataaataacctgagatggaaagttgttagccacccaagagacagtaaatgaaattaacacaccttggtccttggctggccttgcacccacattgcttactgtggattaatgatcaaataggtatttgaaaggtacagattataaatccattgggcaggaccggttctgcagagatggactagtcagaaatgagaattgagatgtgggtaataataaatgccataaagaaactgtcagttttccagtggattaagatttcttttcaaagaatgtttctgtattatatcattggtccaaagtatatttgactgttttactatgttaaacacagaatgaaggagcttagacagaatggttagagatagcagattaaatacacatgtgtaattctattctctcctcaaaatccactaaaatgatttgtaaagagtctttttcaagaataacccacagaccaaaaagaatagtggagaatagattggcaacaatattttgggagctggaaagcagatggaatagagataactgacttatcagatacaggaaagctgaatcccaagccagcaagggggaaaacccagattatcacagaacccagtgccatgcaggtttaagaactgatggcaccaggtatctctgaaaatgaaatcgatgggctaaaaataagttggatgaaaagtctgttgaaatagcaattttatcctagattcactctaggaaatggtaccatccctctcctgagctagacaattatcctttgggtagtgtgaaactgagtgtctctggactcaggacagtgtgcaaacagtggggttaagacataggttcatgtatttaattgaagactccctgctttctctttcggacttgtctcccacacaatagcagccagatgtttatctctaagcagcaactggaattttctctgtggtatctgactagtctaagaggaataaaagaccaaagaagctggcattgtggctccccaaggaaatggcctaatccattattctaacagtggatgaacccctttcgtgtacccagaaatcacactcagctttttaatgccccactcttaaattagagcagataaacaagaattaccagtcatttaaggaaagcatataatgtgagatacagagaaagcagcaagttagaggaaacagaaactacgaagggaggaaaaaaaaaaaactggagggaaagggtggaatacccttgactttaaaaaacacagaaagataagtagagatattgcattcatgagcaaagaacaatgttctaaaaaaaggaatactcaaaaataataatgagctgtaataaattaaaaattgaagagtagaagcaaaaaacgagagaaaaataagcaggggatgggaagggtaaaataattcaaaaggtgattcaggaaaatttcccaacactgaagtttctccttgaatctctcaaatgcccagtgtaaggggtgaggttagatctacactaagacaggatcatgagatttcagaacaccaaacacaagaaggcccttggtttccaaagaaaaatagcagcttttgtataaaagatcaagaattagacccatgttagatgtctcaacagcaacatggaaaccagagggtgatgaagcaaggttttcaaagtcccaaaggaaaattgtttccagtgtagaattctctatctaaccaaactattaattaatgtgaggttagaacaaaaacatttttagatatgtgtggtctccaaaatgttagcttacacacactctttcaggagactactgaaagatgcaccatcaaacttgagggcataaaccaagaaagacaggaggctctaaaaaacaaggaagccaacaaaatagagagtgaagagagtccccaggatcatgagaaagagaaatcacaacacaacagccttacagcagcccagaaacaaaacaatctagactggagcaggtcagcaggatcctggggaaatagcttcaagaaggtgaaactgatagaacacctgatttgtctgaatgcattgaaacttacatttggagagtttggagttgaataagaaataagtagagagaaaattaagcaagcaaaaaagttaattattaatgccagaaaaaaaaaacataatattatacagaaaagagagaatattcattgtatataacatgccccattggtgaatagcatttacattgtcataaaaccagaagcacagaatattgatccaaccaaaactgtgataaattgcaattggcaggatggggaacaggaaatgtgcatgtgtgtggtgggggtgggagttcttgaaagaaagcaaaaacctcatcttccgtcgtggaaggtcagtagataaagcctaaaacagaaacatcaaaaagtagttacataaacctgttatttcgagatatggaggtaaatatcaaaagaatcagctaaagaagttgaaagtggttgcccttggcgataagaaatatgggcagggactgttggtttttctataaagctttgtagaattatttgtctctttaacgtgcaggtacaactttaaataaatgaattttgaaaaacacagaattgggattaactgtgcacattgctgtcaattgttgtagttcaggccactggtaccacacaatttaccaattcaagtttgatatccacctggccatttttaggatgtgtggaatatttatttatagaatttagagctgaaggactttttacattttttaatttattttttcaatgggttttgggggaacaagtggcgtttggttacatgagtaagttctttagtggtgatttctgagattttggtgcacccatcacccgagcagtgtaccctgtacccagtgtgtagtcttttatccgtcgccaccccccaacatttcctctgagtctccaaagtccaatgtgtcattcttatgcctttgtgtcctcatagcttagctgccacatatgaatgagaacatacgatgtttggttttccattcctgagttacttcacttagaatgataatctccaattccttccaggttgctgcaaataccaattccttccacgttgctgcaaacaccattatttcattccttttgtggctgagtagtattccatggtgtgtgtgtgtatatatacacataaatttgtatatatgtttataatgtatgttataaacatatatataaattatgttttatatattataaacatatatataacatatatatgtttatatattgatgggcatttgggctggttccatatttttgcaattgtaaaatgtgccgctataaacgtgtgtgtgcaagtatctttttcatataatgacttattttcctctgcgtagatacctagtggtaggattgctggatcaaatggtagatctacctttagttctttaagaaaactccacccagttttccatagtggttgtactagtttacattcccaccagcactgtaaaagtgttcccttttcaccacatcagcactaacatctattttttaaattttttttattatgtccattcttgcaggagtgaagtggtattccactgtggttttgatttgcattttcctgataattagtgatgatgagcatttttccatatgcttgttggccatttgtgtatcttcttttgagaattgtctattcatgtccttagcccactttttgatgggattgtttttttcttgctcatttgtttgagattctggatattagtcctttgtcagaagtatacactgtgaagattttctctcactctgtagattgtctgtaaattctgctgattatttattttgctgtgcagaagctttttaattttattaagtcccgtctatttatctttgtttttgttgcatttgcttttgggttcttggtcatgaagtctttgcctaagccaatgtctagaagggtttttctgatgttatcttctagaatctttaggtttcaggtcttagatttaagtctttgatccatcttgagtggatatttgtataaggtgaaagatgaggatccagtttcattctcctacatgtggcttgccaattatcccagcaccatttgttgaacagggtgtactttctccactttctgcttttgtttgctttgttgaagatcagttggctgtaagtatttggctttatttctgggttctctattctgttccattggtctatgtgcctatttttataccaagatcatgctgttttggtgactatggccgtatagtatagtttgaagtcagataatgtgatgcctccagatttgttctttttgcttaggcttgctttggctatgtgggctcttttttggctccatatgaattttaagattgttttttctagttctgtgaagaatgatggtgatattttgatgagaattgcattgaatttgtagcttgcttttggcagtatggtcattttcacaatgtcgattctacccatccatgagcatgggatatgttttcatttgtttgtgtcatctatgatttctttcagcagtgttttgtagttttcttgtagaggtctttcaccttcttggttaggtatattcctaagtttttgttttgttttgttttgttttgtttgcagctattgtgaaagtagttgagttcttgatttgattctcagcttggtcattgttggtgtatagcagggctactgatatgtgtacattaattttgtaccttgaaactttggtgaattcatgtatcagacctagaagctttttggatgaacctttaggtttttctaggtacaggatcatatcatcagcaaacagcaacagtttgacttcctctttaccgatttggatgccctttctttctttctcttttctgattgctctgactaggacttccagtactatgttgaatagaagtggtaaaagtgggcatccttgtcttgtttcagttctcagggggaatgctttaaacttttccccattcagtataatgttggctgtgggtttgtcatagatggtttttcttaccttaaggtacattgaatgactttttctaaatagacaggagcctcactacaaagaaaactggcccaattttcttcctttgacaccttcaagcctgcctttttctcctttttgtccataaaaggtgttccaaaaagggagagggcatgtgatgggaagcaagaaagccatgactccagttctaactctactcctaacctactggtccttaactcactcagcatgttggttgtttctccatctgtaaaatgggaataataatacccacagtgcctactttgtagcattgttgcaggtaatcaaaagagagtgtatagataaggtcctttatgaaactaccaagtcttatagatcccaggcattgccatttttctcattaccactgcaactccctgggagagaaatcagtacaggcaatctagaagtttccgttagtaatactgataagagttctgcgatattaaaagagtggcattccggaaggcatggcaagagatgttttaactattccattctggtctggcctgatttagtctgcatgtggctgctgttcatgggtggagctatagacaccttaatacagagaaaaacttatagtcagagtgtgcagaattgtgggtgcttttcactcgggcaccttggccagccagctgctagagtatgtattttcctttgccccaaagtttttgtttttgtttttttaatctccttgcatttttttcccgccttgggttcttaacaagaaatcaaaagcagggagttattctcctcctgacagatctgacttttctactgaaaggaagaatttcaaggcagcatgtcactgcctaaaatgcttatgagggatgcagtcagattggccaagcaatcaagagggaggctttacaaagcattgctaggccccaaagcctgcccaatctaccccctacagattcctgggacagagagaagaattggtcctccgaagaggctcctgaacacctgagatttaaacttctgtgacttgtgttgccaatttggtattgaacattgtgtaaaggaaaagataccatattatagagctataaaagggtctttggaaggcattgaaatgaccctcttagttggcagaattggaaactgacaccaagtaatgtgatttgcctcatctggccagtggcaaaaccaggactggaatccaaggctctttttgctcagtttgccagagagaggagcctactgggctctagagtgttcatagacctaccatgtaatcctatatcaatgatacaatatattatcagctaacatggattgagtgctaactaggtgttaagtgttttacataaatactcagaatcccaactactctatgtgttgggtcctgttattctatcctacatataggacaacaagatcagagaaggtaggtaagtttcccaaggttgcacatccggtaagtgctgggctcaaacccagtcccttctgactcctgactcctcccttctggctgcctccttctccctgcatttcctacattaaggtatttgtgcctgggttttaattgtttgtggcaacagttctcttccctctttctctctgtctttcctatgactttgaattccccagccctgttggactgttgtttctggttcaaatgactgacatggttttatttgggctgttgtcagagtgactgggtatggtgaagtcaccctctggcaggtgttcccttgcgtgtcagaggagagtggcgtcatggtgagaggggatggctgcctatggggtgtgggagagagcagcttgggacaactccagctgcaggttggggaagtgactggcggaagcagtgattcatcaccctggatccatgggattctcacaattttcacgccttaaacaaaactggtgcatttaaaaactgtgtctgggaagccattttcccttgatttacttgggcgatgaggaaattgtgtttaaagctacacatataagaaagtcaatgactgcattacaaaagaacaatgaacaaatgtgaattttaggtttctggtttcttctattgaaagagagagcctattataatttaagagctattatcacagagttgtaaagagatattaactgagaaaggatctctgaatttacaattcaaatatataaaccctggctaaaatgcaatgagactaatttttgtgtgtggctcttgaaatcggttgtttaatctcatacatatgtaattctatagtcacacccctcgtttgtggaaattcaaaaatatttgtagtccttcttggctaccgttgatcttaattaccaatggagcttaagcaatcaaactcacttagccacattttaaatggccctgattcacgaacttgctcatttcagcactgtggaaatagtactcatttgggattcagatggccctggcttcagattcagatgctgccattccctgtgcaatcttggacaggttacctccctgagcctcagtttcctaatttgtcaaatgaagaggattcgtgtgggcctccagaagttgttgggagcactaaatgaatttattttattaaagaactatgacataacagctaacacagagcaaacatgtgttaactagtagttctttttttttttttttttttttttgagatggagtttgctcttgttgcccaggctggagtcccgtggtgtgatctcggctaactgcaacctccgcctcccgggttcaagcaattctcctgcctccgcctcccaagtagctgggattagaggcacccaccaccacgcctggctaattttgtatttttagtagagacaaggtttctccatattggtcaggctggtctcgaactcccgacctcaggtgatccgccaccttggcctctcaaagtgttgggattacaggcatgagccactgcacctggccctggtagttcattttaatgctggtgctagaaagtgctttgtctcttcctgacatatttggaagagagagacagtgaaagagagaaaatatagagtggagatagaaggggagaattccaaatagagatttccctgccgaatgtgtaagtaccgattctccatattgtgggtcagaaacttaagagttgtttctgtgccatctctttttgggtaactggagaaaatagggatatcatgggggttgtaggtagtaataacagctggctatagtaataaacaactacttcctcctgagagagagtcacagaatgccagagaaggaagatcttagaattcttttactgctagggaaactgaggcccagaaagatgatttgacagggaattagcagcaacgctaggcctccaacttgggacagccactctggcatccctcccgctctgcaatgctgccttgtgggctctgaacccactgctgttcaattccttgccttttcttggagcagcaaaagctgacatgcacgttgcatgcagggacctcctctttagtctggacttgttgagtatttcctaataggttgcatccttgggccacaaacattaagagtctaaacaagtgaactcaagagaactgttaagccccagctctcttttcatcacctccatcccccttccctgagtgaagaattgcgtaggttcttccttgcctggaccattcccagctggtccgaaggggccgaagctcaggatgtgcacgtgaaaggcaaggtttcagccaacaggagttctaatttgaggcataaattagtgcacacctgaacaagtgacattatccaaatgataaattgctataggcacaggccattgtgttcctaagggtgatttatggcccaggtttggaaatgaatagagaaagaaatatttaaatgtaaccatttaaaaaccaagctgttaggtttaggactgtcttcaaaaaattgaggcatctttcttttgttggagttgtccatattaatcaaaataaagtggtatggctttaaatttttttttttaaaaaagaaacaaaacatttaggttttaaataggacatgtaagggttttccttcctgttttattttttctggaacacagaacccagaatgaaacctccaggaaactgtacatactttcttaggtcttctctcagtgtcttatcttttgaggctaagcagtaaatgaaaaccttaattgatttcttgccttattgaatctgggcaaagattttcatctctgtagacatagaaatatttgaaaaagacaacaacaggtgaatattatttcaaaagtaaagaggagtaaaagacataagccaccaggctcgtgacatgcacatacacacatacaccccacgtatacacatacacacacatgccacatacacgcacataaacacacacacacacattatgccttaaaaggcaaggttcttccttcggaacatggaagccagatacttgagctatttgtccttggcaaagcttctgcaggggaagagagagatgggcctcatgaagtatttaggagaattcccacccagacagagtcacaatgaacaaatgaaatgagcctctttacaggaccaatagccctctgtaaagctagaaataatgacaaaatactaatggctaccacttctttggttcctacctgtgctgtaatggagcccaaacactcggtctgcatattaacccatgagttgggaattgctattcacatacgcagatgaggaaattgaccagaaggttgtaacggttgacccatgatcatgtagcctgtccttgtcagggcccaggtgcagaattgggtctgtaaggatccagcacttgtgttctctcaaatcttccctacttaacagtggtgcctgtttttacccaacttcccactcccaccaagcattgtacagtagctctgggctctggtgccagaccattcattgcctagcaattagatctggagccagccacaaccctctctcagccatcattttccacatctataacatcagtaattcatttcctacctagctaacgtggttgcaatgtcaaataaaacaagatgaaatatatgtgaaaacagcttcttacactgagatacaccaccatcatcatcattatcattttatattaacaaattttataccatacagttaagggattattccacacaagcctgcttgcatcctcttaggagacttctgtaagctaaaaagcccacgaacaaccacaaagctcatctgaaaccgtgagttttctttgtggggtctgctcacagattccacaccgtggcgtgcctctcccgggctttcaggcggctgcactgggggcatttgaggccagagagcttcatgtctttataacattatgcattaaagtcatctgtaaaatgcagagacattccaaatagcccttatgttttttattttttcatcttggcatggggatacagagcaattttccagaatgttttaaataggaaaaaaacgctcattctcaagacagccgttctgtattcctgagcctctgggtcatattcacattcagaaatatctaagccactaaagtctgtgtttctttaaatgggctgtttctttattaaaacaaatgaaggcagcattcgttccttatataatattcttacctctgagccctgtgggcagggagggtgtggaaacctgggataaagctgtcgaaggaggggggagggggaggccactacttagagaatgttttctgtaattcctaattgaacctttccacccaagttcaccaggtgttttcacgaattttacctagtggtgaggtgattaaatgcttcaatagggtctgcgccaagtaagggctgttcctaagggttggcagtagtgtgccactctattttgtggtctgcctttggtaataactctttatactttatagattacatttccagtttaaaagtcccttcacgtctagtttttcagtggttcactttaataggcatgcagcaatcaatcgctgtgtgccaagcactgcagaaagtattgggaatgcaggctcaacgtggcccctgcccttgagagggtcacagagggacagaggagtgaccaaatcgataagaactaactgcagcccaacatagtaaatgctggagttgagacaggaaggacctggggaaagacctgcatgctgagggagcaggcctcttcccaaagaggtgggggcggcatatgaactgggtcctggaggataaataggagtttggggggctgggaggtagatgctgtgtggggtagacagaggaggtgctataatagttactggtctatagccaggacactcgggctcagggaaagtctctcgccccctgagttcaccaagaggaggctgctataagggactgctctctgctagcctggtggccctcctctcacagtgctgtcccagccttcaagaaggttctctttttaacatcaaaggaagaaacgatgtgaaatcttcacctcttccttgtgggtttataaggttgatactttccaccagagctgagtcagagacgctgttaccaaaacgaaattttgttttaaattagtcttcctggcatttccttctctgcttcataactgaatcccagggcatgtcatcctgttgtggagaagaacttacagaggggtttgtcatgattagggccagagaggtgttggaaatgattgaattaagtggaacagcgtgtcattcttcttttgtttatttaacaagtatttgtatcagtagtgtgctgggaaatgtttaactctacagaagttgttctactgagcaaggaaggaaaaaaaaagccctgatgtctaagtttgccaatttctgtggtgtaaatactctcaccgtagccagttttgggcaaccaacgtgagggtggctgaatacgaggttgggaggagaggcagacttggtgtagcacatggctgcaggcccaggagatagacaagtgaataacacagccctggctgcagccctctataggaaacagagccagagacaattttttaatttgatcttagcaatatttctgttattattttgaagagatagaggcactgagagacagaaacagagagcaagacaaagactgatccattcctatctacatatcttgataaattctgaaatgcttcagccatttgtctcttcctgtgcccctccctcgttatctacctctctgctattgcagtctctgggacatgggtgtttagaagaacatcagattgcaggggaaagtaagacaaagaaaaataaatgattttgatttttcagtgcatcttggcatgtagcatgtgatatacttagtatcttggtggtgggatttttcggcatctgaacttgtttaccttagtgactcatctcccccgcaatgtttttggaccaatgcagtttataaattaattaaataaataaatatgaatcgatcagaagaggagctattgtgttttgagtggatgtgtatcaacatctaactcttataaagacgtgccagacagcaacagccagtgcttgggccccatgaagtgtctcgactccatattgtaatgtttcaggctagccataaaaaggaaactgcttacaaagtctaattgagaggacgccaagaaggcccccagaccccaagtgaattcctcatcagtctgtcacctttgctgaaacatcactgttggtttatagcggttcccccttgctaactgattcccatgaaaactttgctattattgaacactgacaccttaagataaattagtttattggataacttacagaagaatagttagctgcaagtagctttcaaagagagatagagagtctgagtgtagttccagagaccagcacgagggcacggaggcctgaggtattgggatcctggggtaggttaaagggaaggtccctgccctctcactgaggacacagctatatgtcagccctctcggcatgactcaaggttctcattgtgagcatgaataatcagcccacgccataatacactgtccttgagtttaaaaaaaaaaaaaaaagtcctttattgagcaataactagatgcctttgttagctcattatataacttatcccattttcacaaagtccctgtaagttacacatgcttgcctccactttagagtggggatatatcattcctttttagaaggaaattaggggtcagagaggggaagtaacttacccaatattgcacagctaataagtagcaaggtctggctttcagacctggatctgtctgatacttaagcctgtgtcccctccccgctaccatgctgcctgttagggtgagagggtttgctggcacttcccatggctccaggcttgggatggtgccatttttttggtgacttctgcttgcctttagtcctctctgttcttcccactctggtggtgaatacttgcttcttgcttagggtaccttgctgcagtgctccctgtctcctcttccaatgagctagtgctcaggaaccagacaactaagcatgttatttctaaaataagagtccatggattctaagtagagtcctaaggtttctccaagttcagtacttgattcctgagacaaatcttgaacaagctttttaaactcatttttgaatgctttgctactttctaaataaattatgaagtatatttcataggtaaaatattccatacatattttgtaagtacactgcaggtggtgtgtgtgtgtgtgtgtgtgtgtgtgtgtgtgtgtgtgtgtgtgtgtctgttggggaaatgaaggggaaggggtggaggaaagcttctgagctcatttcattgtttggggctcacacattaattaagtttttttttctcatgtataataattaatttagtgactattgccagacggaaacttttgaaatatgtgtctccttaatgccagagttcaagctcaatggatcagattacttatcttcctggtgggttggggctggtcttgtggcatagctgtaggccagtgatgatcgtattaatcttctacacatctggttgattttaaagctttccgtgcaccaccccaaaaggtcagcctaactcctgggaaaagactggaacttttagttgagccagtttgtgtgagcaagtcccttcacctggctagcagcctcaccggcctcttgtggagaaggaagtacctagctgctgaagctggcaattgctcgatgagcccatccagatctagggctccactgctgcttcttgtcaaccgcgtgctggtcttggtgggaaccagggtgtgctcactactttataaatgacaccggtgtccttggctgggcccgtaaggagttaatatctcataagcagagtgcgagaagtcttacataactcattcagtctcatctcatgggtgtttttctgtaaactctgccagaactaatttcacggttttaaaacaactcatggtacccaaagaatgtgtaatgagctgccatgagatgtgattgtttcctgtttgtaaggaaaagacctgtggcttcttgggacttattaggaatcatttctcaattaatgtacaacccaggcccttggaaaggcacacacagtgcagcaaagatggctttggaaggctgtcctggacaggagctccagaactgtcccttctcccagccacctcattcccacctatgtatggctatcttttttttaatggtataatacacataatgtacaacttaccattttaatcatttttaagtgtgcaattcagtagcatttaggacaatcacaaagttatgcaaccatgacactatctagttccaggacattttaattatcccaaaaggaaatcccatttcccattcccttctgccactggcaaccactaatctgctttctgcctctgtgcagaaataataataataataataaatataattaataaatatatagataatataattatatattatataaatatataaataaaatatatttagacataaataatgataaacctactcatggtatttgtataaatggaataatatattatgtggccttttgtgactggcttctttcactgagcataatattttcaagggtcatccaggatgtagcctgtatgggtcctttattcttttttttgtggctgaataatattcttttgtatgaatgtaccacattttgtctatcgactcatcagttgatgagaaattgaggttgtttctacctttttccaattgtgaacggtgctgttatgaagatttgcatacaagtttttctttgaacactttctttgagttcttttgggtatatacctaggagtgaaattgctggattatatgatcatatgataattctatgtttgatttattgaggggctaccaaattgctttacatagtgacaacgttatattccaaccagcatgtacacataaggtttccagtttccttaccaacacttgttattttatttctttttttttttggcggggggtggatagccatcctagtgggtataaagtggtatctgtctgattttctttcagagtaatttgttttcccaaatagtttaaagattttcagaggtgaaaagcttataccgacctggtcactgccatgggctggcccagcctgacctgctaggtctcattacctctccaagtttagaatcaggcttctccatgtggggaagtcaaaagggtgagtgcctggagagtcgtgtgcatggggaagctcttgagctcaagcctgttccagcatacattctgtgtctcccagcagagctagaataccaccctcactgtgatacagagaggcactgagagcagagagcctggttcccgcacccaggaggagacgtggcagaaccacagctaaggcctgtctcactcctacttcaggcttctttcagttctgtcaagaaccacacattcactttgcacttcccttttttgaggatgcaaaggttaagaaaatgttataatgatgatggttatatttgcataggctttacacattttgatacccacaatgatcctgtaatgtaggcaagacatcaggtagtatgatccccatttgaaagctgaagaaaccgaggcatgaggccttttgggtaatttcccaaagttatctccattacattactttgtcttatgtaatgttttatggtggtgcagtgccttacagtctacaaggcatgtcacatctggtagggatggaggtgaggggagaatggtgggctaggtgaggggagttgccatatatagggaggcgccataaggaaggcctcctctgattgtctgtggttgacaaatcaacctgttgtttctgccttactcaccatggagggagggagggcaggaagctgtttgaagttgtgatattaggagatcagtggctgtttgagatccctccttcatcattgcatcatattagctaccatataccaccatggtatcaaactgtgcctcagcgaaatacagtttaaagactgagccttccctcagggagcttccagtctaaacagttgtcaaattcttagctcaaaaatactctcccggggtttggctgccctttccaacacagtttagagaagaagaatataaaagcaaattctacatctcaagcagcccattttgagttggggttttatttgctgctgctgctcttgttgtttcgtggtgagcacaggagtaaaggtgaagagctcctgccagcctacagaaggtgaatagcccatttgaaacattgacttcgggttgccattttgaattctctctatggctgtctccaccaccaaccacaaacttcaggttggttcttcagaggtaaggactctttttcccggttcctgaggtggcatacatctagtgtgtggggattttggatacctgatatcaccctatatgcatagcaaaatggtgatagattataaatgccagtgcttatggtaggtttcttgaggtttttatgtaattgagaagcagtgggaaggggtgtcgcattttagcaactaaggtccaggatttgttttgaaatgaacccctctgagggcagaatctcagcaccacccattttccacatttgtgtggttgaaggacagaaagtggacaggcagaactccaggcctacggtgcttgtgagcagtgagccctaggatatgggcgcatgaggcacagcacccttctaaacagaaagcaagtaaggaagccaggtgctttttctctgcctctggttgaatgataactccaccctatcagaatagaagtactgttattcaacaaacagtggccaatcgtttagaaattaatgattgccattttgaacatgtattggattttgctgtcggaaacctgcaggcagctcatagggatattggggactcagttagctggtgacgtcagtggaggtttggatatctaaaagcaagctttggatatctaaaagcaagctttggctcagtggtatgcacccagtatttttccctaggactttatggtcgtttttcttccaaagggcagcatacacacaggtgtaatggttctctggtgaccatgttcaaatctatctaaaagccatttgaaaacacaggtgatatgtatacttcattatgtgctataagttgggtaatgggagcaaattaaaaaaggaagattaaacatggaatatgtgtgcaggagggagaaaaggtttctcaagaacgcggtgaaacagcagattattcagcctttctctactctcttcattaaagcaatagtgttgggctttgagattttctgttttagtcagacctttatttcatttatgccagtatttgtaaataattatatgaatgtggcattttaagtagacctgttaccaaacagcatgttatttgcagtgactgttttctggggaagaaaagaaacagttgaacacacggcactcagcagaattgtaaaaaggctgccaaagaagggactgtatttttctaccttttccctgtcaccttggagagccagctgggacccaggtcctcaaagaacccgttctagagtgcactgtctgagtcaggaacttcccactgcttgcttaatccggcagaatcacagaggcactgaggcgggagagaaagcctgcacggctcaaatgtcacagagcatcaggactgaggaaggctaccccagggcagcctcccaggatttggtggccagtaagccttggagtctagcctggcttaagtccatctctgtggcaaatcaccagaaagctctttgaagtttcataaattctcccccaagtgaaacatggacacactgaatatttaattaactgttcccagtccttggaggctcaaggcttccttactctctgcttctcacacaggcaagacttgtgcagtgaactttcgcacttgactaagcacattctgatatggtttaatgtagttccttggtgtttgagatgacttaagaaactggcatccagcatcaatatattgaaaatgtgaaagggaatctggcagttgggataatcaaaccaccttacctctgtctgcattgggcattgcagtttgcagagcacatgtattgtggcttacctcatttgattacttcagccatggcagcatatttttttgttgtttttaagtgatgagactccaaaggatgttggtgtgtaagacacttctaagccttattagttcttgaatgaattttatgagtttgtctgatcatgaagactaagacttagttactgtaaccataataatagtaaaaattaaatgaagactactcctaacatactgcaccagtttagtctgaatcacagtatgttcaggccaaaaggaacttttgagatcatttactccactttttcttgttataaatgaagaaactaaaacaccaagaagttaactttttgcccaaggtcacacagctagaaaataaaatcaagttttctttctctttttttttttctctctctctctcttttgagggagtggtggggatggggaggaagggagcaggaaagacagtatttgtagaatttaggggttttgtgacaaagaggcaatgtgtcatttactatagggcaaagtatgattatatggtataaatttgctacccactggaaaaattaataacttcttacatctttgagaaaacatttccagtgatcctcactcctccctgtagatctgagttaccatttggtgtcatttcccttaagactgcagaactttcttttccagttcttttagtacagatctcttggcaatgaatctctcagtttatccaaaaaggactttattttctctttattcctgaagatacaattctgggttgacaatgtttttcagtctgtaccttaaagatgttattccgttgtcttctggcctttgctatttgtgagagaaatagctatcattcatattgttgtttctgctgtaggtctctggctgcttttttgatgttctctttatctttcgacttcagaaaattgactgtggtttgtctagatattgttttctttgtatttgtcttgcttaggatgtgcggagtttcttgaatctataagttgatgtctttaaccatacttgttaaattttcagccgttccttcaaatatactttttctgcttcattctctctctactgttcttctggaacttgctatttcatatatgtatactgtttgatggtttataatgctcaagtcactgaggctctgttcactcttcttcattattttctctttgttcttaagattgaatactttctattaattcatcttcaagtccattgactctttcctgccatctccagtctgctgttaagcccatacagtagtattttttttcattatattcattctacttttcaactctaggatttctatctggttcatttttatagtttctgtttctcactgaagtcccatatctgttcatttattatgtatatatttccttcaatttgttgaacatatttataatggcttctttaaagtacttatcagctaagggcattatctgagtattcttggggttggtttttattactgcttttttttttcttatgtgttacattttactctttatttgcatgtatggagactttggattgggtaatagacaaaacaaatgattgttgcagagaccctagattctgtttgtttctctgaaaataatttttgctttagcaaccactcgacttgcctggactcaaattccagctctgttgttcctgcggtcgacagcagataaagtcacttttctgttcttttagcttccagctgcttcttcgtattgggtcccttggagtctccctcatgcacatatatttttgcagccagccgaggattgggcagattttgtacatagattttgcagcttgctgcctctgcagttcccacctttccagaatttctccccttatgttcttgttccttttctgacttatttctctgacagttcaagctatccagagctgaaagctaacttgggagtgctcccagacaaaaccccacaaattcataaattttacttggtgaaggttcatgtttcaggggacagactcccttccagttcctgttggacttttgactgcattccattgccttgaaaatggtttttaaaaattattgtgtgtagataacttaactgttatctgtaaggggttagtagattatgaccaaaagccaatagcccttacatttatatttagatatttcaaaacactttgtctccgttaacacagctctgggaggcagaactaatattatcaagtctatatcacagatgagatgacctagggaagttaagtgacttgcccaagtagtaactgaatcaggcctgaactcagagcccatgacatcagcctgggctcgttctacaatcagttttatgtacgtttgattctaaaagagccagactttttgataccaaagcatctattgcattttcttcccaataaacaccaccaaacaagcaaaagacaatgaaacaatagacagtcctggattttgaagctttttgggggggcaatgggggggcgtttctagggcctctgaaggtcatagacatttctgaagagaaaaacgttaccatgatggtgttgaaaggaaaatacctgtggtaaccctggaaccatctggtacctacaagccccagcatgcataattgtgaaattgaagctaggccagaagttttcttcatgagaagccatatataaccaggacaagagcgctgtgcattacatatccaggagctacctcttgaaattcttaacatagcaaagcagaatactcagccagcattggcccctgtggtaggagaaggtcttcagctcctctccttcatgggggactcagttgaaaacatctgcaggttgaaagtcacacaaagacgaggaatgttctcaaactggtggcttgcctaggcactttaaaatatgtatacagccttcttactcatcaggttctagacttgcagtttccattctctgtcagtccccagtcttcctgaggccatggtgccacaccatgttaaagtcacatcccagcttcttgaaggaaatacagctttccactagcctctccatcagcgctcacccaattaattctcctggtgcacttcccttcaacatcaacatttgtagttgagttaaggtttctcaaagtgtagtcttcgaaaacctgcaccaagattgtgagtggacacatttaaaatacaaattctcaggctccactccaattatacagacatgagaaattcgactctctggtttgcaggtcagagaatctgccatggaataagtgagtcaggtgatttagatgctcacaaaagtggaagaaccactggtctgggtgaaattatgagtgctaagacctctaaagtctaaagacttaacctgtgtgagccacttgtcttttcacttggggtattgcttctttttctcttgggtcataggttctcagatggaggaaggtgagtcttggaaatcaattctggcttcaacacttatcggttgtatcatctataggctgctgtgctgcttagaggagaatatccttcccaaagttatttggctgtgcctatcacagactgggcaccccaaagtagttcctttttctttattcatttaattcatgctgcctatatttattgaatgcttgttacaagcaaggaattgcactcaagagaccagaagtagacccacttcaaagctgataaaacttaaacttcaggacccttcatttgcaccggcctctcctaaagccctgagaatgcccctagtaatttattttcatggttataggtttctgtaatatttgcaaaagttagatattttacaattctttcttcttaaagaaaatcccctaacttgcttaaacttcagctgccccaaacctagatctgtccctgaaagagctcacaacaagtgggataaagaaacatacatatagattatcaagaaacggtatggatagtcggtgcaatgcagacccagtgctgggaattctggcaacacatttgtaaggaagcagggtgtccagggaagtcttcctggaagaggtggtgcttgagtttggccatggaatagaaggaagactcttctagagaaacagcttgagcaaagttacagaagcaagatatattaagtgtttgtgtatgtgattaaaatactttgctgtttgagggcattttccttcgggctgggatggcctctgatgccaggatgaagagagtccttttccagggagcagtatggactgtggggctgtgttccttgggaacacctgatccttgggatcctggcctcagctggctcctctgtttggcctttgggaggcctactggtgacaacatcaataattgttcttcaaggaaaaatcactcttctattccttgcttcttctcccatagccctccaacccttctttactgtcagccttgcaaatcaatatttcattttgaagagccttgtttgatgccagttctgcttatttgcttcgcagccactgtgggtaacgctttgtaggtctgtcagtatgtaaattaaaccaagcatagatagctttgtgttgcttaatgttcagctgataaaaattaatgtggtgtgaaatgagcattttatctgactgcagatacagtgacggagttaattagacaggcagagagaaaatgttattaagcgggacaggggctttctcatggaagggggctctgaccctcagacagcaggtttggatgggccgtgggtgtggctgaggtacctgggctgaggccagcttggagcaatgaggcagggagggtgccttctttaagcaatcagccccgtggtgctgatgactgtgtggatcctgcctggggaggaaaggagggaggcacaggccaagctaggccaggcacttccagctcactgcaaaatgcatgcgtcagcatttgctgaggcggcttcttcttggtgcagcaacaccgtgattagtagagaaaggagtttcgttcttaagcaagaaaaagaaagatgataggtcaagcacacgtcacatagcagtcaatcgaggggagtttggaacccttaacttcccactaaaatgtcttgagctgtgcgttcctggcctttgcacacactgttccctctaatgggaaagcattccccaccccaccagccatgaacttagcacattctattgcaatcatctgtctccccactcgactgtgtgctccttgaggtcagagatgtgtcttgtgcatcatcagggaccctggtgcaacaacatgttcttcataaatgtcagtggagtggatgaatgcacatgatgctcactcagcccggaaatttcagcctacccctgctttcagcatccttcctgtctcggctcaaatgtcacatccccaccgaagcttcttctgcctctcagacatgatcagctccccagatagatacttttcagacaccttgtacttctccttcatagacctctccaagtttgtgattcactatttgtgtgcctatcactgccaccagacttagctccatgagggtaggaactgggctgtttcacccactgcagtatccccagcagccacaagggtgcccagcacaatcaatacttcttaagtatttgttgaatgttaatacatgaatgaatggtttttctgatgcctgatgaacttccactctttcctcaatgccttgtttggggaaggtttcctaggctcttcccacagagtttctccttccctgaagttctcatagcaccttgtagattgcagtgataggcttgccaaaaggcagctgtaaattttgggttatatcctctcctagccaattaggaaagatctccttgaaagcagtcaaggtgccttattcagctttgcattttcagtatctctcacagggcctggcctttataagtgctcagtatgggttgcagaatttgtaagaacaattgtatgtatcccttggttagttaagctgtatttctgttagataagcaaattcttagcccactaacgtatgctgtccccactccaccccttgcagaggaacactcagaaaagatgactggttgtggccatccctccaccttgaccgcagttgcaggggaaatgttgtgaagaaatgccacagttagtggctccttcgtgattgctgctagcattcgaggcgggtacaacctttccaaacaaacaagaaagggactgttgcattgttgaatcgcgtgcatgcctgccacatctgtccctcagccagcccagcatccttgagctcgcaggcttggtggcagctgcttgagcagtaacagggccttctgttctgttggccccatggcgctccccagcatttctcttgagttttcctgttagatctctttccatggactacacctttgcagcattaaatgacttgctgtagatttgcttattaacctctctgtttctcatttgtaaaatgggatgacattctcagagctatagactgaaagtcttaggtatcttcacaaaacactgacaagattccactcacacaccaccccatggttcctgagacactgaccctgagaaaagccatggttctcactctgtgatcattcgtctgctccacacctccgctgggaaggttgctaaatgcctatcacgagctgagactccagaaagactttacctgcactcgcacagctgttgctgagtgaggtgtggatccagtcgggtgagcatcagggagggaggaggcctcctgtttgtttgccagtcccaggcaagacagggcccaaggaccactggaggaatgacagacctcagggcagatgggcagtgtgttttgcagcaggatctggccctttgctcctttcccctgggtctctgtgcatcacgaagctgctcagtagccctatttcagggaggccacgtgatccactgtcaaccctggctggccctggtggcagaaggttggtgtcctttagctctctagagtagccccatctctgtcttcccacctgcctggactgtgcccccaacttggcccagcccactcctgctgtgcaaggtgcatctcacaaagagagtagcttccatcgtgtttctctagcgaggctcaagactctttgtagagttggttaaggaggtggatacttttaggtaaaaggtattagtaatatttatctttttgaggcatttttgtttctgttatcttgttttatcccctgacctttcaacaaggagcacactgatattgtcaccatttgatcaatggggaaatggagggacagatgtatttagtggcttgtccaaggtagaacatcctatccagagcactcctgtacactgatacagcccaactctcaaccgtagtgatgtcgtgtatgtataaacatgacatctacagctgatgaagcccccagaggcctggaaccatgtcttttggcgtattccacagggttccttgcaaaggcaagtctttaataaaagattttggtgaagttatttgtcagggatccattcattccattcatttagtgcctaacaaatagttatactgagtaccaaccttgtgaggtgccagagatgagatggagaacagagacacaggccctgttgtgcggagcatacagtcttctgcaggagacagagcttgtcagattgccaccaaatcaatgtaaaacaacaacagtgacaaacgcaatgaaggatttgtcccctggaaatactttagcctcaatatggaggggaggaatgcttccccgaggaagcgatgatcggaaacatgaataggactgaaccagacaaagggagtgtgatatgcaaaggtcctgtggatagaggaaggattatgtatttgaggaactgggtgaaggctaccgaggctgcagccctgaaacgtgaggaagcatgatgtgagatgtagctagctggagggacagacgagagacctgacttgagcttcctgagctactgcttgcagaacacctgacatttccttgtgccacattcatttgtagatgaatctgttcaaaagaatgcatgagattgtcctggcagttacaactctctcttttcctttttatgcctcacttactagcaattaaaattgagatcccttctctgtttacctattcatttatttaaaatgtttatcactggaaaggggatgctgaaagtttctccttctttgtttccatcagtgacctcaggaagaaagtttcaaacccacacaagtctgcctcctggtagaccatctgagggcatggatcaagcctgttagaaagatgctcactgatgtttacttttcgagtgcatgaaaccagacactgaaactgttcattaaaaattcctatgttcacagacaaagaaaaatcatttcagaagctctgtaatgaatgtacaagtgggtacaggttatcttgtcaaacacaataatcgtgagtaaatgcaaacggatgctgcttgtatttgattttgtctttaattgaagcatgctgacagctgcctctggacttccacatccttgggttgggggatctggctttttgctttgtaatttcctctcgccagggctgggacaggggtgacatctaaatatgagaagcatctggtcagggaataaaatggagagaaatgaatgaaattaacatgtatgtataggcactttcacatgacccttcacacaaggacacagctaggatactggtgaagggcataggcgacatttctactttatagaggttaggttggttttctactttaaagaaaagaaattagtatgagagagagtcactgctcaagtcatacagctgttaaatagcagaaccaggatgctaattaggtcttctgaaccaacactgaaagctttctcttcaattttacagctgttctttgcatttcacccatattgtacatccaactatggattcagtctaacaacagtacactcagtgctgggctagtcaccagaaacagaagggtgaatcaggcagtggttcctgggcaaagatgctcacagccaggtagggtagacagacagacacagtgatggaatcaaagctctataatggttgtgcagcacagtttgaaatgccagcaggaccagaactttttgccacacagtttggagtgacccaattggaatgtccagaatctccatctcccccattgaatggaagatccaaggttaatgtgcttaatgaagcagtatgatttcagtaacatttggggaggccaatacagggtccctatattttactgcaaaggaataacatgaacaacaacaacaacaaaataactccatctattttttgtcatctttcccctaaaaagtggactttggggactgaaaaaatagaaaggacattatcttagagtaaggaataattctctcctttgaatatatttagcttcgtggaaacttattatgttatccttattttccccagttagatacagaccagtgagaaccaaagcatgggcctgcccatactgtttactgaccagcatgtggaagccgttgatgtaaaggagggatggctcccctaggtttgaccagaaatcattgtgttaaactaattgtgggaatggtttattatcatgcgtacaaattctcttctttgccagtcttgaaaagatgattagccacatggatctgggtttccttcatttcagggtggctaacagacaggttgttgatctgaaaggttctgaaaccctggcatttaaagttttctcaggcccttactggaggtacttccaggacctgaatggatgtgagctcatgtggctagtatgaggagagtggggccccattttagcacctttcaaagtcatcccatgtgggaaaatggaagaggtcctctgcaaaggtgagactcaaaggccaaggacctgacttagaccagagactcaaggatgcgacgttttaagccttcttcctgtatccagcgtgatcttggtgaccctctgtatttcattattttcattttcaaaatccttaataaaagcccctttgtgttttaagtgttctcaccacaaaaaatactgtttgggaggtaatgcatatgtgaattagctcaatttagccatttcataatgtttacatattgcaaaacattgtgtagcacacaataaatacatataatttttgtcaataaaatttaattaatttttaaatagaaaagaaataaacacccctttgcagagatgaggtggacaagaaaacagctgttttaagggcctcctagtacagtctgtacaaaagcctttatttctttggtatattaaaaaaaagataaaaacattcaagtaaatcctctgattccagtgacattagatcttacatgcaccccctttgtatttgcagtttgatttcttttttttactattccattatcaatataccagaatttgctaagccatcccccattattgaacattaggctccttctggaattttgtgtgtatgtctgtgattagatttgatcattaaaggcagtagtacaatttgtgtagtattttgcttctgtcagattatttccttagcgtatagtcccagagaaggctgctgggtcgggatatgcacatctttataattttggttaccaattgccatatttctttcaagaagaattatgctggtttaactcaatgcctatagcatttgagtctatcagtttccatgcagcttggccagcattagggtattatttccgaaaactgaaatgttaccttttcaaagttgctttaatttgcattttttattactagcagggatgaacattttcccacatgttcacttatctcttactactcattaaaaatgttttagggccacatttgagagaggggttgtcttcgggaaactttgcttctcatagagggaggggcagatggcagctgtggaagagtctccatgaataaaacttcaactgatttctgtgatatggagtgacttcatatcatatgaccgcctttgcagttaaaaaaatgaaaagatggttgtaattcttgtggccaagagaaacggacttaccaaaataaagatcgtgaaaggagaacatatttgtttattctgctgtccttattgaaaagtttccagaagtatctacaatgccgtcaatctcaggtctttccatctttccagttgtgtactttaacactttcaaagcaaaagagtggttgcaaaagctatatggtacacttccttagctgtatttgtgcattaattttcacgtgctcttaatcattggtcttctgaaaacagtcgtgcaacgggcatttctttttttttctttttttgctgagttggagtctcactctgtcgccagtctggagtgcagtggcgcgatctcagctcactgcaacctccgcctcccaggttcaagcaattcttctgcctcagcctcccaagtagctgggactacaggtgcctgccaccacgcctgactaatttctgtatttttagtagagacggggtttcaccattttggccaggatggtctctatctcttgacctcgtgatccgccctcgtcggcctcccagagtgctgggattacaggcgtgaaccgccgtacccggcctgggacatttcttaaagctaaataagcccactgcctgaaaggggctgagtccagttcacgctgctgggctccccacccacagctgcccagactccaaaatctgggatttgaagattgtagaacaaagtgggaaacaaactaaatgggaaacaaacagttccagactctcaaactctggaggatgtcagagtctgttttcttaacattatactaataatgcctttcctgctcccccgttgcccgccccctaccccccaccccagggaggcactcagcccaggggttatataactgtgacttgacaccacagccaagttaagggagcttgcactcggctcactgaactgtggcaaagcgtgcgttctccgtccctgcacttgcccgtggagcagcacggttaggggataaatagatgacttggagttacagatcagctgcgcttaactctgtgggctggctgggtcccctccgtgctgctgaaacactggtaagcaggccaggcagagtcctgccccgggaactggaatgaatgactctcaggtaccaaattaagccccagcacgaggactctgggctggttatgttttccttcctcgcttatgtgtgtggcctcaaaggcactgctaaccataaagcatgcaagttcaaggggaaggggattcctcaacaccaaccctgaaagctgcgggcaccagagatgagtttgttctcacctggagcagcagtgacttaacaagagacaaggataggctcagtcgtccccactccaccctagcacgaccagccagcctcagcataccttctatgcacttaagaagcagaaggaggcggatgtatatgtttgatctactgagtccaaaagatgcagctctcctttttacaggttttgttaccttcaagaagttactgaagtcctctaagtcttagttccccatctgtgaaatggggataataatagaatccacctactaaagttactgtgaagacaaaatgagatatggaacaaaaagcacttggaagattgcatgacccctggtaagaggcaagtaaaaatcagcttttatcagagtgctttttctctttggttgtcccttcccttgctagaatgggtgacactagcatgtagggaccgtgtctgcctcaccctggcactgctagattcatgcatagttcctgaaacacaatagaccctcaataaattttacgactacatggctacacggatgtggattgcagatggagaagtgtggtttttgttttgttgttttaatcatttttcattttcagttattttacggtcatagaatccctcattgtgctcatctatcaagcaaattgtttcttttgagtccatttaaatgaaaaaaagaatgaaagagttcttgtttttaaatagtttctcacatgaaacatcaaataaaactacattattaattgaacactgatgctagttggaagctattaggcgaggagaagctcgcctgattctttttaaaggaacttccctcttgaatgttctctgacaggtcatgtatcttacatgcggatgttcactgtctacactgggctctctagaccagcccagtggttcccaggcctgtctgcacatcaccagtccatgtggaacttttttaaaaaatactcccgcataggccctagttccagagaagcaaatgcagtagaactgaattggacataagagtctccaaaagttctccagatggttttgataagcagccagggtagagatccactaggccaaacttttccactcccagcgtggcaaaaaagaaagaaaattctctccctctatttatctttaatttctcatattcattacagctcagctaaaactcctcctccccaccctctccccacctaacagacacatgtcacatgtattctgtgaagtatgagtattttttcttcttacttccatgagatgtataaagatttgctgaaaacccccaagtgctttggaaaacacatatccaaatgaggaaatgtgtttctgatgagggaaggctgaaatctgagtgtctccacccttcgagttgaggcaaacctccttggtgcatatgagccacaaagatcattcctcccaggcctcagttgactgatcatgatgttttagtcaatggaaagaatatcagtgcttatcagtttacagcaattcctggggaaatgtagaaccatgttaagtttgttggaagcttcattgctaggactgtcttgagaaaaaccttgtagagtttcctgcaaagtgaccaccagcttgacttttgtagaagaagtgtggattactaacattagccaacaggttcatatagtgaaaggctgcaagatgtgttggcctgttaacctatctgtttacttacttgtgccaaacagcatttccccttctatggtgcttcctgctcctattacatcttccacagcagcaggtgcagtgagcagcctggattgcaaatgacttcgatggcagggctgggccggtaaaacccaagcctccattcagggagtcttatggagagatgcattagactgccctgggcatttaaatggaccattggtgagcctttgatctgaactccttgtggttgtgttggaggaaggcaattctttctggccagaaaactgaggatgcaaaaagataagagttgggccaacctgggagaggccactcggatcactccagggagacaacgagccttgggttcctaggacgggttttcattaatttttgtgaatgagaaaagtctgatgagccttcactttgcacagcaatccaaattgcttgtgccttactgactagaagtccaatttaggcttgaaacgagttatttatgctcgctacctaaacattctcgtctataaaatgggagtaattcatacctcacacagtgttgggaggaggaattgattaattaatgtttacaatccactttgaacttgaaaaggcttcttgggaagttattattaagcctatatcatttttactttgagttctggggtgtgtctaaacctgaaactcaaaggaaacctcacagtccgtcccactccctcaccctgaaggaagataaaatgtaatcagattaatgcaaattccctgaaaatggttaccctttaaccagtagacactgtgctcttataaggctctccagggatcctgactcaaaagggaaagagaaaaacagtaactatcttccatgcaaagaagcaggaagcagttctttgaactgggaaggggtaagggtgggagaattctgtttttcgctaaagggagctgtcagttctcaaaacacttagttcctgaccccctaccttcaaggccccgagaaagccaaacagagaatctgacagccagaaaaatttgtacataaggcattaaagaatactcaatatactttaatttctagccctgctaatccatcctgttgtcaacagcaaaacaatcaaatacagccagttgtctgcaccgaggtaactgggctgtagtatggggttaggtttgccacataacctaaggtaatgcatggcagagggcactttaaggggcaacggctctttggaactcagtggggggtgccctttcgttagaacagggaaagaaaggcaggtccttttgcatgggaaaaaaaaaatcacaataacctaatccctttagagagccatcagacccgtaaagattaaaaaacaaacaaacaaacaaacaaacaaaaacaaaaacctgagcccagctgttcagtaagccacatcagaaattatgaagcacattgatccctcagcactgagcattggataattgtttcttgctgaagaaacagctacctgtgatatgtatcaataccaagcctgcgcagttgtgttacatttttcttgccggaggctatagcttgagttttaagtcaattgagtctatacactagaagctcatattgactattggattaaacagcacgtcaatttatttttctgggttcgatattcaaggatgcaagagagcaaagagatcctccagatgtgcttttgtgaggcaaccgtaacccacttacattgctgtgatgctttttaagccatttgaaatagtatttgcacaccccttgctcagcagttcaatacgctcctcgactatgggtattttactcattccctgtgctgccgagattgcggtttgattctcggttctccaaagtggttactagaggtgagcacctggactctgctgcatgaggggactctttcgacttcacctcttagagtaaatgcctaccgtgctgaataaggatgttaaaatgaaggtgtaatccatctggggactgcagcccacagtgatagggggctgggcatgcaatcttaatttctctcgcagaaatgatcacatttaggtagtaggctattttagcatcttaatatcaggtgggactaggtaagattatgccattttagagatagaagtgatgaaatgagcacacattaaatatttgagttgaatcaaacttaactggaaaaactgaggcccagagaggcaaggtgatttgcctaaggtcacacagatttatgcaaagctgggactgtaaccagggtctcgtgatatctaggctatcaattttccatgataccatgaggctgctcgttgtgatttctccgtatccgtgtttcttcctgagctaatgttccgggtcttattttgttttgtattcagcttttcacttaactaattggaatatactttgttagagaagactaaagtgtgaacattcttatgctttgtttctgcatagttattttggctctgtttttgctcgtcttaaagggctcctggtgttttagagtatgggacagcttgtaaggagtaataacattcattcatttatttagtaaatatttattcagcacctattattaactaggcactactccaggtactagagatatatcaatgaagataaacagacaaatactcatgtcttggaggagcatatatttctgcagagagaagacagacaattagcagtaaatacaagaaataaataaattgtatagtggtacaaggtgataagtgctaagggaaggaggaaaaatagggcaaggaaaaagggaggcaggttgcaggtttaaacagaatggtaaggataggactgcataaatccaaagacggtaattgcactgttactgatgccatgtctagacagtccttggtttagagaaagatttaaggactctttacaagaactccactcccctaaccagacctggaccccaaaccctggggaccccataccttgtctttaccttttacagccacggctcaattgcaagcttcttacccttttagtgcaggatctacgctctgctgtgcctatctcagtttggtttgcataatttaaaaggagcagaagagcacgtgtacttaaagaaagcctggttgtgaagtctctgatgctccttcctttctttctccccagcacccagctctctgtaggtgctcactagcctcccaggcctttgctccccagcaggcagccttttgcgtctttaaatgcctggacagagttccgcctgttttatttccctcctctcctgaagaccttgccagattacctagccatctgacaaactagtccaagatgaaggggaaggggctcaagaatgggaagagtgaggtgggaaccacagaagattcagtctgaagtgtgtctaataagagtggcggggagagaaagggagtaggagttgggacgaggcctgctcctgcaagctggtcatgagtgccttcatctcaagctggttggtcatcacaatatcgtgggtgctgtctacactcaattctagccgagccagcaaaataccttcccttcaacaaagtttcaggttcccatcgaattaccgataaggactaagccacagaattggaggttgaactagttcacacacagttattgctgacttctgcacatctgacgcctcctctggcacttagggatggaggagatggagtcaaagggtagaaggagtcgaagccccaggtaggagatgtttttcccctgccgcattgtattccataatgacccagccatgaaaggacggggtgcttcacaagacaattcttctatgtcagtaattttaaacctaaagaggtttgatgtcccataagcatattcatctttccatgtttattaaattaagccctccgtgaatctgcaacaccatactgttcattaataggaaaagagaccgttgtttccccccagggaatatgttggctcagatctgttccaaggtaggcataaatgaattgtgcgtgtgtgtgctcgtgccttgagtagggggtaatcagggaggggaaaagagcaaagagggaaagaaggaaaagagatcttaaagcttagaccagaaatatccaagaaggatttttatcagaactaaatttcagtactcctggcggagtgcctagcaagatattagtttttataaagagaaaaaggaacgtgttaattgtagtgtctccataggaagaaaactgcagatctgttcaagagaacccccacgcaaatttgaaaacagcttacatataggaaaatcaggggtttttttccttctagcaacattaacatagtcaaacaactgaagagagaattctattaacgaagtcagtcccatcaagttaaagcctagtaataccaccatcagggctcggtggggaatctaatcttttgcagcttggaccagaataacatggaaaacccatccatttagagtcacgttactactagtgctgaaggcaaattcaggaagcccgacacaagtttacggaacttaagagagaagggttgaaagaagaaagaaggtaaaagatattctggcagccacatgaatcataggtaagaaatcttagacgtgtggggtgtctcaggcctcacttgtttcaggacaacacactttcttcaacgaatgttacagtaacatactcaaaatatcagtcacaaaggaagttgaggaaatgtgttgagtaatcatgaattgatactataattaccctaaattttcaagtttccagttaaagccaatggttgttttgtaatagaatctaaggaacatggttatgctgtgggttcaacaaaagagaaagctttcgtcctcaattcttaggctctgctttaggatgaaattaccatggaagtggcagactacagcctttagaaagagaccagcaaatgacttctgtccattcagaaataccagtggccaatgtggtgtatctcatgagtttagtgtaaaggaagataaagactgtgggtatttgtgttacctagatatgggtgcatccgttaggactcccaaataccactaagactggtagccgcccagggcagtaagcagggtagggaaaccagagacgggctttctcttttcttggcatacactctactagcagaagcgggaatacccacagccatgtgaggaagagtccttaggaagggatgtctggtggaggatctgtgaaggagattgggcctctgtgatccttctgaagtctctgttgatggcctctcaggatgaagccatttccattgttggctcttggattaggacagattctgagatggagacatcacagaatggcgccacagatttgacgatgaatatcatgactggccttgacattgaaaagtactacgcagactcacctgacccagatgctctgacaaaagccaacccattcagagcgataacatgatcaggttccctgaggtagaaagcagggaactgcccttttaggaatccccagaagccgtggctgtgggtgtccgccaggtcctccagtctgagtcaggccaaaggcacgtactgttgtcaaagggtctcacagctgtgccacgttagtgatctctacactgctgctgaatgctcctgacttatgcctccccagacagccaaacagaattgcatgaacaattagcatcttaaagctgggagaaaagaagtatttcagtgaaacaggtatagctatcctcaagtctttcttatgtattacataaatgtgaagcacaccttttcaaaaacagagttcttggcctctgcccttgggaaatttccatatctaggtagggtagtgtcaagtctgcttggcccggtagctctggatgtttccagagtcgatactgacctgacctttcttgagtctttatgtgcgtatcaattcagtggctagaagttgcccctgagttcttgagtttgtctggactcttctgccactgtgtgaccttcactaagttatttctcttttctaggtctcatcactttacctctaacatggagagttctcttgctttcaattctctcttttgtagccagacttaatagttatcggggtatcacttagtgaagtagattttggagtaaatcaatattagtaaaagtattggtaaaatcaggattggtaaaaagtaccaatgtaaatttttgaagttcataactcagctgtgattgcgtaagaaattattcccattctcgggaaacacacactgaagtatgtagagctaaaggaccatgtatatactatatcctcaaacggttcagaaaacaaatatgtacatccatgtagagcaagagaaagagagaaaaaaaaggttttcagtaaatcactatgaatgataaagccagcaccgagtatataaagatcattcttcaagtcaaagttcactgtagatttttaaagccaagagcccgccggaaagcctgtgactccctgtgttccagttttcatagacttgtcaagatggatcaaggcttcatcctcacaaccttcaggtgcaaatgagctgtcaagggaggttttcagaaagcaataaagagccccttccttagaggccaagagagtctgggtctcccattttagtcaaagaaagctaaatggaacttgcaactcaaactatgtaatgattcaccccatggtaataaagcagccctggaaaactccctggcgggattaatcttaatcggcaattaagataaagtctgggcacatgctaatccagggcttaatcggagacattttaatgtgctgccatggtgtggatataagactaggattccactaattgagcctggaatgtgggtgtgaggaggaggaatcgcagtgcaggggttgcctgtagatccagcagtgaaatgaggttttgcaggagtgttgggcagtctgggctaggacggccccctacgtgtggctcaccttgccattcatgaacgctccatcttttctgtagagcaacaggagcaaaaaggcaaagcaagttcctaacaagatatacagtagacgtcttgctttacttatcacgttttgaaagccctggtgcatgagatgatgactcacacaaggtaggtgtgggtacccatacgaggaaaagcaaaatagttttttaaagagaaacatttaaaacagcttttaaagaaagttaaagctgacattattactctgtggtatttttccctagaaatttattttttgcatatttctaaaatccaggcaatcacgaggtagtttttaaatataaatttccagtgaccaagacttagtaccctaggttagcaagagaatcctgccacctgcttgccagctacttttgtctccaattgtgtcattttaaaaatcccaccttgaactgaacaatgagaacacttggacacaaagcggggaacatcacacaccgcggcctgtcaggggggtgggggcctgggggagggatagcgttaggagaaatatctaatgtaaatgacgagttgatgggtacagcaaaccaacatggcacatgtatacctatgtgtcaaacctgcacgttatgcacttgtatcctagaacttaaagtataatataaataaataaaaataaaaataaataataaaataaaaatcccaccttgtcagccatgatttgaaaatttgttgctggcatgtaccctgaaattctcatgagcaactcaaggatccagtttaaacagaatatacttagagaagtttattccatgttcttggcctcatcactaaatgcactgcagcaccgtgctacctatgtttttccaagatctcgtgtatcctcatgatcctgagaggtaggggaggaaccaggcccttctcccagatgagacaactgatctacagagagaacaagtggcttgcccacataagactgtgttttgtattacttattattcacttgtccatgggaaatgaacctggctatcaagtttttaatgaggtatatgatgaagttcatgtatggggttcgtgctaacattctggagaacaggttgagccttccctcaatgcagggaaagaagtgtgagaaacatgaagctgcaaaagagagcagctcggtgacaatcaatagtggccttttctatcactaggtatcccttgagcaccaactatatgaaaggcctagtgctggacactgcaaagtgcacaaagaaacataaggcaaggtcactgctacccaagagcttgtgtcctcttggaaagaatacagtatagagatgaaatgatagctaagctcccaggcaagtgtgtgagatgtaccaatgaatgggccacacagaacgagctcactggtctaaaaagaccaagagattacttttggctgagtgttcagggaaggcttccctgaggaggcagtcttgaataatccagggcgagagaaggaaaggaggcattccagatgggaaagtaactcaaactcagtggaatggagggtagggggagttggatatagcagaaaataaggcagaaagaaaagagagtcagtctatgggggacccagaagtcctaccttaagagttaaagcttgttcccttatgcgctatggatagggttgccagatttagcaaataaaaatacaacatgcccagagaggtttgagtttcagataaacaaagaataatttttgatataattatgtcccaaatattgcatgtgacatacttatacaaaaatattatttggtgcttatctgaaattcaaatgtacctgggtatctagcattttacctgacaaccttaactgtggagttcttgaagattttggagtagaggagtcccatgaaattaaatctcttccaaaaaggagcctgagaatcatacatcaagagccgtgaaaactagccaggcatggtgaagcattcacgtagtctcagctactcaggaggctgaggcaggaggatctcttgtgcccaggagtttgaggctgcagtgcactatgattgggcctgtgagtagccactgagctccagcctgggcaacaaaatgagactgggtctctaaaaaacaaacaaacgtaaaggagcacgaaacctcactcatcctacactttcctttatgggaaagctcattggaaattttatgccccatctaaggggttccctgtagctgaaactcatgaattacctggttatgagatataagcttaatatgaaccatgaattcaataatgtcacaaatgaggcagttgtccctgggaaggctggttaatgtagagctgaactgggctttgaaaacataatttcttacaaacccctgacttctaggctttccacacctgcctgtatgtgctggtcagttaagaaacacaaaaggagatcagacataataggcacaacattaaaaacataataggaaaattacattggacttctataattttcattaaaatctcttttctccaagaaaaaaaaaggaatatcttttttgaacatttgtagtttttagaatttaaatgggcagcattcagaaacaaaaagccctttaacgaaggtgtaaattgtgcctttttaaaatgacttttcttccctaccctagtacccacagtaatgaacactcctacccaatcaaaatatgaaaacaaaattggagctgtgtcagcatcttggctgcaaataaaactcaaaacaggttatagcacatgctaggaatacaaaataaggttagaaataatgcttcagctgtgagttcttcaggcagtggaaataatagagcataatttagtagaagaggaactaggcagtcagcatacacagggaaaatgaaagaagcaagaaaaatgcaaggggtaggaaacagggttggaagaaattggagggggacaatgggtggctaattattagaggaaaagaaaggcccagcctggtcagagaacattcaggagcatagagggtggtctgcttgaagaaactgctggtaatagtgagttttccgaggtgattccaaatggatatcagacatcagagaggcacactcgtggcatgagagtttataacatcaatatctaactgccaatgagaccagaaagaaggaatccactgagacctaagcaggcttctgctacctggtgactagaacattcaaggatggtttattttattagtctaagattatcccctaaaccctaaccaaatttgcagagcagctctgtagttatcttggcttacaggtgcatatgtcagctcacagtgctcaaccaaatgggttttttttgttgttctttttgcaacttcatcgagatattactagtccagattccccctaccatgtaagagcacctaaccctggtgaataaagacgagacaaaaagagttaacaggttttctgcttcatattatatttgcaagaggcttatcgagacagttatctcaaatagcagtttgcacatttactttcattctaactcaattaaagattatttttcttaaatatttatcatggaagttcatttgcctttgctttacttcctgggactaacagctaagaacctgttattaagggaaaggggtggcccttctttactctctgttcacaccaggtaaaatcgttctaaaatgtggtcgctagcgtacaccaatcttgaatagggcattagttgcctgattaggatgttgaccgaagtttcacaagctgtgttcactgtgcacgttttaaaaataaccacacatgcagtacacattcagtgaagatttgttagggaggagaaatgaaataatgccgattgaaactcccctaaatgtactacagcctctactctgcatcctttcttgaaataatcattgtgtggagaagacacatcattgccaaagtcagctcctccctcccacctggtcagtcctttctcattgtctgcatgtgatgagttcattagaaataacaaaaatccattttatcaggccagccttcacctctgtctgtcagtgcacctgctcttaattttaccacttatgattcagttgtgagatggattttaagctttggcctctggtttggtttattccatgcttgtactgctccatattgatttttgttaaatgaggcctttagtgcttagctgtagaggcaattatttaacgctttcaaaaatagtatgggagtggaaaataaaaactgaaagttcagttgaggtccagccagtgatttggaggcatattggtttcccataacccacatgagaaagagacattcagccagcctacggctcacacctggacaaacctgcccatcctttcaggtacgttcacaagctcttggtggaattgtttctttcttgattaactttacagccccatcacgatcccacagtgcacatatgccatttcctcattacctgttccatgcccagcaagtttctgatgtgtttcaaatttgaagttgcttgatggatgtatctgggtattggaagtagtgagtgcattgccatctggcaaaagaggaggcagcggcaaagtcttgttaagcaaaaagtttggaggataagcgagggtgtcatgatgggggatgagaaaacaaatgaaaacacagatagaatttactgttgacccttccaattcaatttcacttcccccaaggagcccttgataagtgtgtgattcagccaggaaaactccacccataggccaccctgcatggagtagtacttcctgcatatcaggcatctgtgctgggcatggtggtgtagagtgatgaacgagatgtggccctgcccttaaggaactgacagtccagtgaaaagccaccagtgtacggaccttttaccacgagacacctgagtagaaatggaggctctaggagccccagtgttagacaaactgacccaggggtcatgaaaatcttcataaaggaactaacaattattcttggttttgcaaagcaagaagggagtttgcaggtacaaaagagaaggtgaggacagggaatagaatacacaaacacaagaagtgatcaaatgaccaagaatacctcgggtacagtgagaagtgtggtgtggttagactagagcagagttgagtttcagtgggagaagacaatgtgagatctggcagcccatattgcacccttcctggggactttcttgcctttctaattgaaaagaaggatgcttcaaagctaatagctctagttccacacccaactcctctatcgtcagctgtgtgaaatagggcaaggtacttaaaaacagcctcaacttttcatgtgtgaagtggatattataatggcagatttgtagatgtgtttagaagatcaaatgagatgacatatttagagtacctgctggtatcccccaaattttccagttagtatttgcctttgtgtgtgtccttatcatggaccacagactcaaaaggccaatgtcccagcaggtaacatcaagatatcaagaaagccaaggctgaggtccttaatggtaactgttccaccacctcagtctagaaaaaaatatatatcccaactaaaacaggacccatgcaggcaggaagccctatttaatcacaccttccaattttccaagagaagcttgaagcacagatttctaagtgaaatttcccatcttttctgtgttagttactaatctgaatttaaaacacagtgtaggcaaaacagtacatgtctttgggccatacacaacctgtgggctgccagttgacagcctttgatctctatcttctctcccactacattacaggctcttacagggctagtgctgtggttgttaatgattcgtatcagggctggctcatggcagatgcttcatggttggagggcactgactttagccacatacagacatcgacaccaggggcgaggaaaagcaagccaacaagtgaggtgttcaaaagtgcagaattcaaagagtgacccaatgccatagcacaagcccaggaatgaaaacttttaaaactcggccccagcaagaagctcctgggagaggagcagatccttgggaaaaaaaaaaaaagtgcagtctgtgaagggcaaagtttggcaatctattaaacagcaagttacaataggcgagtgcagagatcacagaggcagggattaatgtacacacatctatacagggaactttgatgctttcaaatgcctcctcgccatctgaaaatcaggcagcaggcatcgcctacatatttcacagcagtctacctgtctgggtgtttgggcttgacagcaggaagctctttgaaatgaggctgaggcatttcaaacacttctgcttgaatatccagtttgtatattctgtcgaaggctttttaaattggctttattttactttattatatttttttttactaattttggaatctcttattaagtcgaaagtctgcaaaagagcaaattacaaagccaggatgccttttgacgatctcaagtgaatgatacagacacaggctcgcaggctcacaggctcacacacaattccatataacaaggaaggagagaagttacattcacagagcagaactattttcaacaacagtccagtgaaaagtgccaaatgtttgaaccttttgactcctgcccagataatatcataatggttcagagagggatgtttacagctttctatgcgtaataaataatttagaagccattcattaaaaccttctaaattacagacactgcaggcgaattccttcttttaagaaggaaaggatgagctgaaaattggtccccggtttcttgccttcttctctttgattctttttgtttattcttctcactagaagctgagtgagtaaagtaccgatattggggggttaggtgggggagcgggttacaccactgtaaatacttagaaccacagtgcacgtaaaaatgaagctgggctgccttggcctggtgaaatcatgcgatggaaatctgaagatcttacattttattctgaggtccacagaggtcttgtttatgcttctcttctcattttaagaaggaggtgccaatgtactggcagtgaggaggaaagtggaaggatttgcatgaagcagcttctgtgactcaggttttcaaagctgtctcatggaaggcaaaaaatactatccttatccgaatcgtgatacaggtgtggtaacttggctatctcttctaacaccacattgcaaggccttgattgtggggtgtgggaatcttacacaagacccgaccaagccagagaggattagctttaatttcattcaaaagctgtaagtaggagaaaagactgtcagtatcctaaggcaatacttaggaacaagtagaattaggtaggattgttttgggagtgacagaaagaccatgattctgagttgatctcaagaactcccaggccaggctcagtgggcacacattgaatttattttcattcggtttggtgggggatcctgggagcaagctactttgactcatagatgtaaacagtaagaaaccaaactgttgatttgagccaaagtccttctcgttcaaaaatagcctgtatcagggaaagagagaagggggaattagaaatgggccctgggatcgaggatattcccaatataaagacacccttacttctactgtaggcatttcagattcccactactttgtcatccatgttgaaactgggcaccaacttcccgattcaatagcaatgaaggcaacacatgatgctgtcctttgtggtagctcgcttccttttgtggaggcataccaccgagaggacaggcttctggttccaggcacagaagccatctccagctaaatgatgaacccatttttaaagacgtcgtttttatggtttcttaaatgacaaggcatttcaagtacaatgtggtaaaggggcacgatcataaagcaatgtggttggcaaggaaggtatttcattgtgagcaggggcgtcgaagccgagctttatcaatgagtggaatttcctgtaagtagaaagataaatgaattagtaactcagagtaattttttaaaaatacatatccagatgaaagctcagataagtttgatcccttttagccaatgaagtatcatctctaattaggtttccatgcagacagtgcagccttggagtacatttctgaatctagttgaccttttcagctggagaagccaaatgatttccattccatgctctttaattctggaggaatttctaatttgttgccagagataaaaaaaaaactcactccaaacatgaaaaaagttttaaatagtccagagccccatttacagaatattaaaattttcgagctgagagaaccctaaaagaccattttattccattcctttattttactgatagtaaaattgaggaccagagaaaaatcaaagactcgcccaaggtcactcagggacttaggacctaggattagaacccataccccccgcttcccaccccagcctctctgcttggccagtctctcatttgcctgctaggctttttttcatgtggtccagatgttgccgcatcaaaggcctctcactgaactccgccatcagacctgctttagggaaacttccatgggccaacacctaccctcttgcctttcttaatttcttttggaaattctctattctctcaccttattaatgttaaaacaaaacgggttcttttattgccacaggcagcaggaaagtgaagttcttgatggaggcaagtgtcttccctagtgagagcaagtaaattagttctgaggtcctctcactcactctaactgtaatgagagacaccagcccttcttcattaatgagatgccaatcacaaagggagcagcctcagagagcctttggggaggggggcggcgggggagagcagtgattggcactgtactaagaagggaggaagcagaaaataaaagcctccggaggtgggaaaacacgtggatgatctcaaatcagaagggtaggtccagcggaaacccgaggggctcctgaatgggccagtcagcgtagtctatggcaaacatctttgggcaggagaattggggagctacccccctggcatattttcccacgtatgctttccgaggcaaggttgtgttcatgctaaagtgtgtcccacatggggatccgtatgattggtgacagttggggctccttaatgactgggttctcttggaaggctggcagcagcgaacctcctcgctcctctgccttagatctcgtcaagagtttaacatgctgtgtaacctcctaaactttgaaaaggaaactttctaaaagaaagttaaggaaaaataatttgatgcttaagggaactttttttcttgcatgagataatttccctggtaggagacactgttcttaaatttgtccaaggaccggttaacccaagaccatgtttccagggcgggggaaacatctaaatcatatttgttcaactcctgctctcaaagtggcttgggaataggttctgcccctggcaagatgatgcttgctgtcttttcctctcggctacccagaatggcatttgcagcatcgctgagaacgttttgggaaaatatctgtgcagttttcccaactcagttttcaccatctgcagcctgcctttgctttggtaggttggttaaaaaaaaaaaaaaaaaaaaaaaaaaaaaaatctgtgcatattggaaacagtacttttatttgtaattaaatgcctttttccctgttattttttccctgaaaacatttttgtttatgaatatgggtctatatgaaggttaaaagactttcagcactcaaaacaacttaataaaatgtctgagcacacaattaggcgtgctatgtccttcaagaatcaggtagcggaagttctaattggcaaagcagcatcttgaatgtcattttctaaacccattagaccatgtctaacagagaaagaggagaagcagcagcagtttacgaaataccaatagtcccccttgcagacataattttagggtagcggttagatgatattgaacttgtaagaaaatgtagctacaaagccacagtagcttcaagtaaaatgacatttctttagatcatgtgtaggctcaccttgtaatagtaggagtaaatatgtgtataagcaacctggagatgctcctttattccctgtgtgtgtggtgtgtgtgtgcgtgggtgtgtgtgtgtgtactgtgtgtgtttcatgcacttctttaaaggcacacagttggctgtaatatgtcctcctttctctgaattctggtgacctttcaccatagatggggcaaggcccaggcctctggtttgatagaaatacagcacatctgtcttcagttattcacatctgataccataaccttcgtgtctggctgctttgggtctaccaccattaaaatttaaattaagaaccagaagtttttaataaattcaagccagagttgagcctcccagagatgttatcttgcctggaatcccctcgttttagtttaatagtacttttggaaaatctgacaagactcacctagaaattccattctttgttgaagaccaaaaaggaagaatcaccatggaaaataaagattcataaagccagctgcattttattctagatgcttctttttctgctagaaacctgtttttcaaaaacttggttgacaaagtctcatttgtatatttttccccttatgttttagacacctgggtttttaaagataaaattcttgcagatgttttggattagtctgttttcaaaagtgctcaagaacttgatttccaaggactagactttttttttttcattaccaactactgtagtttgcaaagagggagaaacttagcttgcaattggcctgaattcaatagaatcacacaccctcctggttttaaggaacatttgaaactgaaccgtgcataagtgtgccacctgactgagctttctaaacaaatatttgtcatctttgtcagaccaaaattctcatatagtgttttgaatttaattagaggcatacctaaatggttaggggagaaggacaggacagaagtctacccccagaaatggctcataggaaaatgagacaacttcagttttacttactcaggcacaccataggagaggtacttctccaagctggtaagtgagccatttttgcaaaaatagaagcaacattctgggcaagagcttgaaagtagaaaaggcctgggataaaacataattttttaaaaaaacatatcataaaagagagttgcccagctctttcttaacttgtgaactagctgttctacacatttaccataagataattgatgtttgtaatgctgcccctaaggcactacaggatcctaaagtgccttctgaatcatcaaagaatgattcattgcgttctgggtggttttcttgttgagtgtattttattgtatacgaatccctttgaaaattgataatacatctgtgatgggtaccagaggtttgcaatcaagagcacacagccacaactggtgagtgggaagtgtctttggtgtacaggctgggtggcacccccacgtcctccatcctgctgcttcgaagaggcaatgtcgcccatggaatctgcagaagttggtctctgtgaaggtttcattcaactcctccctctcctccctttcctgctcatcttgctagtaggagcccacgtgtgaacagcaatttcatattcccacccctccctgtgcccaaaaggagaagggccagaaacttagggtggcactaattaggcagcgtcatacaaaaactctgatatttgaccactttttatctacaaaagcaacaatctcatatgaccagtcacagtggttacaaatatcaggcacctgtatgtgtgtctgtgtgtgtgtgtgtgtgtgtctgtctgcatgtatagacatgcatcgtcattcaattacccagaagacttgattaacaagaataccaaagctccactggatcacacgacttgctgccccctgatttgttaaacaaataactttttccttctttgctgttccttagctgataaccaggaatggaaccctagcattttcacagcactgctatgcattaggtgaaaatggccttcctatttcttggtatgctctgtttatattttaatgctgtttacagatgaaatattccataaatattcatacggtgcctgtacaaaggaaaggatccaaagagctctttattaacaagctcccttatgtcagggtaactatgggagaaagggctttaatccatcctcccaaagttctcacaaaaagactgaactatcctctttacacataatattggggtgatctgggatttaccagctaaattcatagctaaaagtgtcagctaatgaattattccaagtaaattaacagactaagggaatcctttcttcggtcccataccaatgctcccttcgttagcaaatacgcttcatgtggaagagagatcaactaggtgccagagaatgtttagcccacattcatcctctgcacagttcctccaccccaacgatcaattgacatttcttagaagagcattttattcttccaaaggaaggctcagaaacattgaaaaaaaaaaatattttaaagctcagagagcttctaatgaagtaaattaaaaccttttaaaaaaacacacatacaaattgaactttttataaaatattcaggggcttcaaatttaaaactattaaaaaaagcccacatatacttcaaggttatgcttttaaaaaatttaaaatactgagttgaatgactgacaagttcaaaatactctcagactaatctttgtaccaaagaaattaaatctaacaaagtactttttatctcctcaatgggggaaaataggatagcaaatcatatttccccctcctatctttgtatcaaagatggttaaatatttctttccattccatcatatcttcccaactggcaagataatacttgggaaaagagtaggtagaagggaaaatgaaactggcagctcctgagatccacagggcatcatttggcacgcacttctttgaggcccacccaaaagtggttaatcagagagtagggacgatgtcagattacattagaggcagatttctctatgtgtatgggcaaatctgagacggccagtctttcaggtctggagctgtggttgcacgcaaaatgtgatcctaaaaatgaaatgccagtatttaatccttccaactactcagcttcctcattattctcttgtgggaattgtggttgctactgactcaaagttgccccccgtttgatgatgtattcattgctagagttggcccccatgtccccctcaacctggattccagttgaggatcctatagtgagaattcaattaatctcaagataaaatccagcaacaagaacttttaagccttgaaatgcacaaagctatgtatgtatttatgtgtgttgtgttgtccaccctcaaacatagtccaggctggcctctgtaaggcaggactcttcagtgtgttctctcaggctctccttggggaatatttcttagcagagtgcatttttgttacatgaggccatagatgcatgtggctactgaatcaaccattttgacgtcagttagttctttccagttgtcctaatgactattcattcagcatttgattggattagaataggttgatgcagttcaactgaatcaaggtgtagcaaggagaaaacccactggattgtaaatctgaagaacggtttgagcctcagctcaggtgctaacttgctatgtggcattcagatctctggatcactctggacttcagtttctttgtctgtaaaatggtaactgtctggcctctcttatcaatctttcagaattcttaattcagattaaatgatctggtgggtgtgaaagcttttgaatccatctgagttatcagctggaactttatagagttagttggcacagtgcttcaggagataatttgaggatgactttgcagggaatttctatgccaatcagaaagtattcttttcttatgtaccgatggcagggaaaaaatgagagagaccattatatcagttggactcacttgatcatcaccactttaaaaatgagcaaaaactagttgagagagtcgtggcaaatccttggcattagctgttaccatggaggtgaagaggaaaattcccactccccaactgtatttgaaaacagagaggtctccagccttggaacaagttgtggcaaatggacaggatgtcctagaatgacatcctaggtgtaaataaatcaccggaactgatggcagccacccaagagttttgaaggaactcaagggtgaaattgtggaactattggccaaaacgtgtaacttgttacaaatgggtactgtgctcgagacctggcaaattgccaccacaactctgaaagaagagaagcacaaataggtgagcctcccttttatacctagcaagctggtagagactatctgagtgggtcgtgtcactgaatacatgcttattgtagcatggagaattactgagcattcaccctgtgccaggcattgtgctggatggtagaggtgaacaaatgaaagtgtccagaaggctgtttgacaaaggggtctgaaaattccagtgctgcaaacatagatttgggaagtcattgacatataggtcaaagaaagcaaatagccttcacctagaggtgccggtcccattgattggaagatcctgtcttggatcaccatgcacactagactatcctgaaaagagagcagagatctgctagcaatgtctgcattgctgggctgtaccgtgctctgtgtttgccatctccatgtgggtgaatgttggaattctgagggtgacgggtggctgtgataacccagtgagagtgtgaaaaggaaggagggaagaggttaaaaggcagactcctgcacaaagcaagcatttgggggtcgggagagagggaagaaaccagcaagggaggctgaaagggttcatcatttacttgtctgttcctttattcaacaagtaagcatgggcactttctatgtgccaggcactattttacaccctggagtcacatccagggatgtgctctgtttttgggacaaggaaagtgtcagatagtaataaatactcagaatcagaagacggattgtttgggcactgtagcatggttggtcagctcttacaggagctgaaacctgtatggcaggacttagccagtgatacaaagaattgtgagaagaacattctaggcagaagaacagctagtgcaaaggccctgagacagagaaaatggcagaaaaatactctttgcagaagtttgactgtgtaaggtggcagcttgaggggaagacaggactgggaaggagttttcctgaacctgtgtatagctggttggctggctgtgtagaatagagagacctgataatgtttatggatttgaggaaaagaagaaagtagaaaaggaaagactgatgatgcaagggagagaaaagatgatcaacagtgctgagaaggacggttgttttagagaaggtgcaaagatggtaagggcaagggcagatataaagagtctagaacagcgttccccagccatttctaaacttatgcactcatttcatagtaatatatattatttgaacatttttttaaacatctaatggttttgcatgtaatgcaaaatgaaatgagttaaagttttaaaatgtatgcgtcattttagataagtgtatattaaagattttattacaaaattaattgaatatagtatttactaatattcatggattataataataaattctgaatgagttccatctaaaaagtgattcccatggtttaatttactttaattatgtaagaaatgaccatttatgaaacatacattaaaatgacatctattagtgtgcttagtttggcaactaaataaatattgaactgtaggttgaaatttaactgtgtctcatagtatcaaaagtagtcaaaaacagacaaaatctgcctttacaactaatgctagaaaagcttacattttgggtaaaaacatgtgatttatttttattctttgtttatttctagtgaaataaaagaggatttctggctgctattagtaaacacatctatacaaaaaattaaaagccaaactggatataagcaacaccaaactttccattattaacattgatttttgaacttaacggagagatcttaatgggttatgtgacaggtaaatgcaattctgaaatccagtgaagaatactttgacatatatttataaagttatcatcagatgcacagtctttataaacttttcaaattttacttcagaattcttctactatttgtcattaccaaaaacccgctgtgggtaagaatcagacaacttaatcaattaaacaattaaccaaaaataaacattttaaattgcctcgtcattcagttgccacaataactggtaacattcagctcctcacccaatggtggagggtgacgaagtcatgagcacaggtaggtgatgccaaactctgctcttttaaatgaaaaccatatgtaattattcactacattcatccagttatttaagtagaaattaaaatatctgctattatcacctttaatgatatgaacattgcagaaactttttttgtgaaaccctgggtttccctcagtttgggagctgtcacttaggagaaggtggagatattgagggatgataagccccacaagggcaaggatttcgttttgttcactgctacatcccctgtaccaggacggtgcctggcacagcacagacactttgcagatattcagtgaataaatgaatgagtgaatgaatgaatgcaggttaagccgaagtcagagttttctgcagaggtatggaatggagtggacatgatttgcatggaggagagaaactgctgcaagaacaagagagggaacaaacaggagatgagttagcaaacaaccttgtaggtgaaaaggcagatcgtttccatgaagaacaatcatgtatcccacaaccatttcttgaacagcttctatgtgttgggtttgtggaaaatgctatgggattcagagatgaaaaagactcagctctctgctggagaggatgtggagaaataggaacacttttacactgttggtgggactgtaaactagttcaaccattgtgaaagtcggtgtggcgattcctcagggatctagaaccagaaataccatttgacccagccatcccattactgggtatatacccaaaggattataaatcatgctgctataaagacacatgcacacgtatgtttattgcggcactattcacaatagcaaagacttggaaccaacccaaatgtccgacaatgatagactggattaagaaaatgtggcacatatacaccatagaatactatgcagccgtaaaaaaggatgagttcatgtcctttgtagggacatggatgaagctggaaaccatcattctcagcaaattatagcaaggacaaaaaaccaaacaccacatgttcttattcataggtgggaattgaacaatgagaacacatggacacaggaaggggaacatcacacaccggggcctgttgtggggtggggggaggggggagggatagcattaggagatatacctaatgctaaatgacgagttaatgggtgcagcacaccaacatggcacatgtatacatatgtaacaaacctgcacactgtgcacatgtgccctaaaacttaaagtatatataaaaaaaaaaaaagactcagctctcatcttcaagaagtgcactgagtttacggggataataagagagatatccattccagactgagcatacacaacccacattccacagacattagaaggaaagagaaaggagtcgaagggaagtgctagcttcaagaagcaagagaatggagccctatttccagctttgccaccaactggaaagtcatttgccctctctgggtcctagtttcctcatctgtataagaaaggactaggaccagagctcctccaatgtgcctgtgcagcaaacctctgacagtctatgggatttggaaattcagaggaggtggatgtcaatgttggcagaggtattgtggacatgtatcctcaaggatgtggaagttgagttgtccctgaagaatgagggaagggcgtcaaagttgggggtcaagcatttcaggtagaagaactaggaaggaattaagccatgagactaaaacagccctaataattttttgatgtccattttatgaagtaagagaagtatgaacaagcagactcagatgatatggatgctacagtacagctggaattagcaagagtttgtttggaacaaagggtcaaattcatctaactggagtaatcccaactttggaaaccccatatgttggtgttaagagcagtcttctaaaagagctaagtgagaagaatgcacaacgaaacctccatggtagtgaaacaatgatgtaaacaaaagatgatgggaaaatgtgacacgttctcacaaggtggaaaagcagccgatgattttcaaagcagacaaataaaaatacctcatgctatattgtgaatatggatttctacccaaaaagggatgccattaggactcaaaagactaacacaatataggaagtaaccataattctattgaggccaaaattgaaaacatcatccttattcagactcattgagaggaggttgaggaagaagagcaagtgagtagccacggaccagtgttccgggtctgggtcaagggccttggccagttgcttaatgttggtctcttcatctgtccagtgggagtaataatacttgctccacatgtatcgtgatgctgttacaaggatcaaacgggataatagaagtggatttgctttaaaaagaatcaagtgctgtaatcactggactaaagcaatagaaattcatgcatttgtgatgtctgtctagtatatgaacagcttgtgcaaacacacttaaagtagttccttgtatttgcagagtgcttcagagcttgtcaggttccaaaaaatataaagggatatagcatggctttatattctgaaaacctaggtttggatttcaatctcattgcttcctagtgtgatttggcgtagtgttatttaacacatctgggctcaatttcctcatctgtaaaatagacagagatacctacgcatgcatggtggttgtgaaattcacatgtgataagggatgaagggtggagaggtcagtgcctgcccatgcaggccctcagagcacactggctgtttttatttccctgttccgctaggacataagctcctagggctgaccacgtccattggtattcccagttaccagcagagttcctgagacagaattggtgttcgataaatacttgttgaatggatggattaacagaatgaacggatgggtgaacacccaccctgtaacagagatgaaagacggtaatatctgctatcttgggtaagaaaaccaaggctcagagagttgaagtaactgttgaaggttcgtgtcagaactaaactgcgagtaggacttaaaggggtcccttttctacgccatccacgtgctgctccctgttctgaacctctaacctttggtggaatcatgggctacagttttctgagctgttattgtcatatcttttagaaaaccagaagcaataatatttgcctctgctttatttttctggacttttgttcagggctcacagagtaaaaaaattcaagtcaacttttacattcttcttgttgttttgaaaaggggccaaaaagcaaagcaaagaaacataagcaaaatctcaaatatctttggttttgacagtccctggatggctggacatagccccaggaaaatgaatctaatctgcactgaaaggtacagtttgtttctttctcccacagacagacggaaatgtgtgtttgggaggctgattcatccaatggcccctgcaccaggcctgggaccagcgctattcattatttgctctgttcctctttcgtttacaaggtcagagtcgatgttttggttgttttcccagcagtgctctactgaccgacttcgctctaatcccttgatgtcacttaaataaactcgaggcgggtgggggtggggggagcaatttgagaactccaatgatttcctaccgctgttgttctcggcggcaaattaatttgatgctgttatgtaagtgtaatcatcctctctaatcacatcacaggattgggaactgccagaaataacagaagggaacattggagatatcaaaggggagccactaaaatagattgtttatttaggtaccaaattgaaacgctattattgggagatggaaaacaaccgtcgccacactttcctttcacacgtccctgcgctttacatactgtatttgtcaggatgcatcagccagaaggaaaaggaaagaggaaatcagagcttccatttgtgccatcgggaaggaaatggggaaagtcagaggtgtctgagcgtcaatgggcttttgttggtgcgcaaaattttggttgtgattactgctctaagacgcttctctctgcctgatgttctttcctgatgtctgccctctctcttctttattctttcccatactagcccattgccttctccctccccattttttttttagcaagtcaaagaagactcagcctagctcggatgatccttctccacctccttattgatggcccttctctcaagtgatggggaccctggagataggttaaatgcatacagcttccctatctcctcacacatgttgtcggatctcttcccaaactcttctgcttctacctagacatggagtcataggggtgagaaataaagtcccatccttacttggagtgttttacagagtggtctatgcagttttggtagaggagcttagaggcctgtttttgttcctcagctctgttcctcctccctgggcagattgtttactgtttctgagcctcagtttcttcatctataagaagggatagcgacaccaagctcaacctggtgccgagaggatgcaggaaggtaacacctgtgaaagccaggcccgcagtggtcaagaaagcaggtgctggagtcagagtctgcagtcagaatttgggatctgggccccagcactaccactcagctgcccaggaccttggtcaaggtacttatctctttacacctcaacatcatttgtaaagtgggataaagaaaatactgatcaaaatagcctgagggttaaataaacatgcatattttcaatgattggcatagcgcctggtctactaaatgctagcttatcgtcattattattattctcattgttattatttattgttgtaatagcaaagcttaattaaataataatgatactaatgatggtgatccgtttcctgctagtcccacttcttattcccaccactgatcttcacgcaactgccaattcctcctgatgttatttgccataagtaatcaatacatgacaacagggttagaatcactgttgaaggaggcagaacaaagtgaaccatggacaggttgtagagagagatgccccgccatggggagggaaaggacattcagctgaaggctcttaggagacatactccttagggcctctgactgtgggctgtccctgttctcctggtctcccaggccctctgcactgtcttggattctgctccccacctgcctttcttccctgctctcctcactgcctgcctgaaaatgccttctgccagccaagtcctcacagtggagtgaaataatccttttaccgtggggtaacgagagggacatccaacctggagttggaactaaggtgcttgaatccttccctgcccttcgcccctcagatgactgtgtttatggacctaggtggctttgtctatgaagcatgcatggcacagtgccagccaattccctctttctgaagcaactgctagaatactgaataccttccctgaaggtaaaatacaaatattttttaagtgaaaaatgaaaatacatttctgaaactgttttctacatgctgatcacaaaagggaatagattactatccatggtcctcttttgctctttttcctctaatctaatctcagtttgatgtcctctctccttgaaagattatatacatagagagcctaattattaggctgcccaaaacagctgctatacctggacagaacgctcactgaggtttggtcaccagactcagacaaggttgaacacggtagcatctgggacaaaaatatgcttgcaaaaatatattgaaactgaaattttaaaagggattctttctctgcttctgttttctaaagaaaattatctgcacaattgttctctgtatgtcacttcatttgacatgaacttttcaaactgcaggttttagctagctagtttatgcctaaaacaaaggaaatactgattgaggagaccagtggcatggtggagagtgagtcctttctcagctgtagatatgacctgggtctcctaggctttggagtcagactttggctatgccactttctggctgtatggctttgggcaaattacttaacctttttgaacctccatttcctcaactgtaaattggagctgataatagtatccatctgtagggatgtagtgaagataatatgaaataataaatgaaaaatacttggcacatagaaaggttttgattaatattagctatattgtttttaagacagagtcttgctctgtttgccaggctggcgtgcactggtgtactcatggctcaccgcagcctcgacattccagactcaagcaattcttccacctcagcctcctgagtagctgggactacaggcgcacactaccacgtcagactaattttttgtaatttgtagtagagacggggtctcactatgttgtccaggctgatcttgaactcctgggctcaagcaatcctcctgcctcggccttccaaaatgttgggattacaggtatgagccaccgcacccagccctaatattagctattatcgttattgtttttgttatttagatttagatctttaggtgcctaaaatcagggaacagagtttctctccatcatatcccctggtaaaaggagacagtgtctaagtgtgctaacagacagcctgcaacatttacctgggcaattctggtttgcatttactttttcccacaaagtttagtccattaatgtaagggttacttaaattgatcatcaacttattctccctctcttagctagtgtaaattaatctcctaaaatagctaaaacagttcaatatttgactacatatcataactcaccaccatagaatattagttagaaaaaaataagcatttacagaaatcccattaatttacatttcatccctgcttagagcaatttgcagtaattcaatctggatcaggctacgttaagttttacatctatgttttagagaaataatttactggaagaattaatggtgcaagtgagattgtaagggatgtactaaacttttaaagacagtaaatatttttataacaataatagtctgtatgaaattaaaatttgtaatttataggtggatgttgttcaatgaaggcatagagccatgtttctcaaaattccatccaagagagaatagggggaaagaccactgctcataaactacaccccacgacttctgaatcaggatccctggggatggactctaggaatgtgcattttaacaagctcccggggtgattcttatatttactaaaatttataattatctattatacaaaatattgacaatcacttatacattgattaaggtaaccgggaaactccttcacagctatctagagttcctccgtgtactggaaaacactcgagcttcctcttttaaaaatattctagaatacaaacactcccactagtgcagactgatctcccccttaaacagggaggtgttgctgaaacataccccaacttcccgttatcaatgccatgcttcctgcattataaccctgtaatggaaatccatactgcctaaaaattagggtggtaagagtgggattcaaagaaaccaggctgagacctgggaggcctagaaggagaaccaggatagaactgaacaaggactcagttactgaaccaggagctgtgttggtcataaggtcataaggtcaggaacctagttaagaacccagctcaggacaagttgactaagaggctgccttaatttgaagccactgcacaatccacctgtgagttgacatataagtcaaagaagtgtgaaacattaacatatataagaaccacgtgaggaggaacctcttactttatttgaatgcagatggttcaatctctggacccattcccttgttaacaaaataatccctatgtctgaaggcactaatttatgtctccttatgtgtgtgtgttttttttttttttttcgctaattatatcagtattggcttaggactacttttttcatccatttctatgtaaactatatgatatagatgtgcacacatgtgcaaacacacacattttaggccagcgcatttatgtccatacttaaaatattttaaattaggctttgacttaaaagcaaatcttttcatcttattttataatggcaaaggatgtgcagcaaacacaaagttgacccagaggttcatttatgccactgtttgctggagattaagaccatggggcgagcaagtttgcttgtaactgaagcacagactcttggccatttgcaacattttaaactttaacaagtgggcaatgcaatataaatgatgctttaaacatttatgcattgggtgggaatctatattaattataaaacaaaaggccaagtcctagaaacaaagaagcattattattttttttctttctgagttgctttactaagaattagatccctaaaatagaggcgtagaaacaagaaaggttctacctactagatttgtagcttaactgggagcccaagacaattcatctgagagcttaccatggcctgtttgcatattctgctccttgccttgcttgtgtcctccagcaatcacatactgtgcatctcaaaaccgcctctccttgtgcacagtagtcattcttgtggtccacatgggaaagcctcacctattctgaaattctgaaatggtggaagcaagtccaaatggtagtaagtttataaagtgtctctggcaggtgattggagcatgttagaatttttctttctgtataaaaatatttgtatgtattcttctatttaatagatcgaggctaagtaaagagatgccaattttaaaaaatctgtttcgatatctttgctctacttccagtcactcgaaccctacccttgatttatggagtaaatcaagttcatctgtacactcccatctctcaggcagtgttctcatactcccttgaagctggtggataagaagcattgaacatgcccatctcccagttaaaaagatcttcctcaccagcttgccttgtttctaagaattttgactttttttgaactctcccttaaggattaaaacattgctgttatctgggaggtgggccatacttagctgttctcaccttaaccaaaatcactttattggtttcttagagaagagattgagcagggggatattccccagcctggggtgctgccaagctttaatagagggtctctaacattgggggttaagaggaacaaaaggggagggcagaagactgtgaacacaaatggtaatcagttcccaattcagcctgaggctgacactaactagagtcgatcggtgagtttctactcactattttattcagagtaatttgatatggaattcgactcttccccactggaaatgaagtccctagttcctcgggtttaactaaggcaggcaacctacagcatgaagttgaaataataatctgaattatttttcaaaaacacctagggaaagatattttttatgaccacatatttgaggtggtctatgcaagacgaagtatccatgtaattgtacaccctctagttcatcttgtctgtccacacacagtcatagcaagacacagtcatgtacagtgaacccaggcttagaatctttacctcttctggaaagttaatagaaacttctgtctccttgggtttgtctttcaaaggtttcagttttctcttgggaccggctaccaggagtctgcatcattgatcacaggtagttgaaggtcagaatgtttttttttctctccctttccaatttttaaccatccttatattgcgagttctaaagactagaatttatgaatctcagggctcataaaccactctccacccaccatgtagttgtaagcggtgactatacacacctgcagggcatacctgacatgttcagcatctgaaaagctgcaactgggcagcaagctggaagatcaaacctccattcattaaattaaaaaaaaaatgcacatggcccaccacccctgacagctggcagcctatatttttacagctgggttttaacttaacaccttttgggatgctgtcttccaagagtatggatttgtgcttttcaactctgacttttggattttaaaaaatggagcccagagactgtgttggacacatacttataaatccacgaaggcttagcctacagaagccacaggaaatactatgatattttggaaaaggtcgagtttcatggattctgtaaggcactcagcaggttgtaattatttcttttatttaaaagccttccagatatttttttccagagggtctgcaattgaggggtagtagacatttttttcatagtgtacattctttttggctgagtgctggaaatacacaggaaattaagcggctttaaaagacccagcggcatccagtccaaggcatgaggtcactgaaacagaatgggagatctccaaatcagcagcatcagtttttggctgcctctgtccctgtccttgtgcaggagggaaaaaaatgaagcaggtgaacacactgacctgttctgttttaacagaaaccaaatgtcgccatgtctacaggcatggctcagcagctggaatcgctcaagaggtttagacacaggccaacaagacagatgtgttgaggcggccaggaaagtgaaatgagttgcctgtgtcttagttcaagatcctggtgctgctttgggccctggcctctctggccatgccgaggccaaggaaagcaggccagctccttattgaccagcctctgggctgcctcttaggaaaatcagatgcaaggactcttgcctcagaccagagacagaatcggccaagtttttggtctcagcaactaaaaacaaaaagaaaagatctgcttctgaggcagcaggtagctacccggacatgtgtctgatgacttttgcacaggaagatgcggatcctgggagtgacgggaacgtatggggagaggacttcacagaaggtgggctcttggcttcagcctagccgttgcctctgaggttggatgagattctgctggaatcctggaaagcagagaaaactcccctggaagcaaatttagagtgtgcgaggtcttcactccctgctgtctcattcggtttctttttggctgctttgggctgagtagagttaattttgagcaaagaacttcagccagcatgaatgaagcactcccaagacgagtcacaaaatggcctttcagaaagagccgtccattgagatgggagccagcgggtgaagtcaccatcagcacagggcgcggtggccaggcataggctggattcaagagaatcctggcctgggcccatcatgccctccagcatttccatttaatcagtggtggaggccccgggtgaaatgaggtggggaaattgtccagttcccagtaggtttcctaggactgagtttattcctccctggctcccgactcagagaagataccaggaaggagtagaggagaattgttaatggccctgggcagaatcagtctcagaaccatcacagccaccattgttatcaccaggacagtaagttgctgaatatcatgctgtccaaggggccttcctcagtaatgatttgggtggctcttcacagtcctcagagcaagctggcatacccttatcttacttgattctcatggaagtccagggtgcaggcacatagcaccattcttgccccccagtttgctggtgaggacactgaactcagggagcgtaagtgacatgtcctgggccacacagctggtaagagggagaaccaggactcaaatgcaggtcttcaggttcctacttcagagcttttgtaactatggcaagatgcctccctggatataaccgaatcagctacatgggtatgggagtctgtcctctggaaactgagagccctaagcaaacgacacagctgtttctatctaatttgtatgaaatggagctgcctcatgtcccccgtgtcagcacagtgtcattcccaaagaagcacacattggttttcaaaaataatttaaaagcaacgtatatctttattacagtctttcagaaaatgctaaaggaagagttccatccacagcttacggcagattttctgaaaaatctctttatctatctatctcctcaaaattccacctatcataatatgacagctgccttaatcactcctccttctcaaaaaaaaaaaaaggaagtttcccagaacttttttttttcaaccctagtgctttctgattcttatatttttctcacccaccccttatcttacagatctagcatttcccctcctgtgagtctggtttctccaatggaaaccaaccaaatggtcttgcttctttttattcttctccttcatccccattccatgactctgattggaaaaataaggcccaggataaaattggacggaagttctcttctccctagaagacaagagggaaagagaagctgtaaatcactttttccttgtcacatatgcatgtaactgagacagtgactgctaaccttcaccaagcccagcagcacataagatgtggcggcagagcctcccactaaatttgggcttagaatcagagtcatactgtctggagatgggcagagagattggcagatccactcaccatgccttgtggatacttcttttgtcaacctcagtcattctttcactcaaactagtgttttctgcctttataagacttatcagtgtctatagcagagtgacaatgggattgaagctcactcatcttccacttcaagtagatatgctattcactgttttcttatgatggtcttagtcaagcttaaggtttccacttaagcctaaaaataattctttcatggtaggcatgtaaacagggccaattaataagtagctacttaacctttgctatggaaattagcctaagtttaatttttgccagcatcatagaaccagtatcagtcatgagtcaatgcatttacagccgggtgcggtggctcacgcctgtaatcccagcactttaggaggccgaggcggtcggatcacttgaggtaaggagttcaagaccagcctggtcaacatggcaaaatgctgtctctactaaaaatacaaaaattagccgggcatggtggtacatatctgtagtcccagctactcaggaggctgaggcacaagaatcacttgaacccagggggcggaggttgcagtgagccgagattgtgccactgtactccagcctgggtgacaaagtgagactaaaaaaaaaaaaaaaaaaaaaaatagaatgaatgcatttacataaatagggatatcatataacttgtttctgtgtatctgcctccccattttcattgcagaattattcacaatagtcaagatatgaaatcaacctaagtgtccatcaaataatgactggagaaagataaggtggtatatatacacaatatacaatggaatgctatttattccactttaaaaagaaggaagtcatggtcatttgcaacaacatggatggacctagaggacattacattagtgaaataatgagctaggcacagaaagacaaatactacatgatctcacttatatgtggaatcttaaaaagtcaaactcatagaagcaaagaggagaatagtgttagcaaagactgaggcttggggggatcaaggagacattgatcaaaggacatagaatttcaattagacgggaggaataagttcaagagatctattgaacatcgtagtgaccacaattaataataataaatacttacaaattgccatcagaaattttaagaattctcatcacaaaaatgatgtctgtgaggtaatgcatattaaacagcttgctgtgattttgccattcgactgtgtatacatatatcaaaatatgttgtacaccatagacacataccatttttacctctcagataaagaaaagtttactctgtgtgtagtggggtttgtgtgattttcacattcttctgaatagatttctgcacttacatatctacctgtttaagtgagcatataacatttttataatcactcaaacattgaagttattttcactttttaaaagaataacagcattcaatgtggatgacagtgaggagacaccaagaaacttggtggctgttgaagataataactcccaatacatacacatatatatctatctatacatatagatagatatagatatatctccagttgtagtcacaggaattatttgcatttctctctaatcaatctagaatggcttcttggaggaggttgggtttcagaagttacagaaatgctgtgagagaaacttttgtccagtggagagggaaggaactcgcaggcgctgtccagaggaggcttggcagggagtggcatgttgcttcccaaggagatttgcacggttggtttgaggcgagtgaggggatcagctgtggccatgcggccatgcaggaagtgtggaaagaagacaaggttgttgaggcctcccacttgaataatgaagagatgaagacagtgagaagttccctgagactctaaatttccagggagagggctgcacctccttgaccaactccctggagtccattaggccaatgaggtgcggctcccatgcctctgcagtaaggttggggaactagatctgctatgaggaattatggggcatttactaatggcccaggtgtaaacctctacatttccagggccagacagggaggagccaacagcagtctctgccctggaacacaaccctctgagaattttcagtctgtctgaccctatcctctgctttattccattctctagaagctcttacccaaggaggcatagacccatctcactttcccctgatcttggttttcatagcatcaagaaagaacccctgaagcccatggcctgttgagtctcttatcatcagagatcatatgaacagagtaaacagtctttctcctttgagggaaggagaagcctgggagcgcacgcagcccctgcaaggtaaagaaagcctgaaggtcatattaagcaagagccactgttccttaggacactgtcctctgtgcaccatgaagtttctggctgggaattgaatttgagtcattggttcactgaactttctcttcctgtcccacattatttgttaatggtcagtgttgtaacattagctgcttgaagcatttggagaggatttggggataactcaagcggtttatcactgacttggagcatgggatgtccattcactctaaaccacagcattgccactgcccaagaagaatgcctaggcttatattttgcaattgtttcaacaccacacgggaaatacaggtgaaccaattgcacagcctcaaaaagtgccacagctgctttctcactggggtttgcccaaccttttgggtcagtctgttaggttaaccaacccaccctctattggtagcaacaggattctgctagctccttcagtatggtcataaaaccaccaaagctgtgagagagagagagaggctctatgaagagcagaacagttaaaagaaatacctcatttggtcctgcgtatgtacctaacaatgtcacatttttttaaaagttaacctaagagatttacagctcagagtgccactgagatttttttattataatttgtgctgagagaaaaagtcttcctggggtggtttcaacagctcctccacataaacttcaagctcttcatttctggcatgcacactctcgaaggaattactgttatttacctctgcctgctcagagagaaccatttcatggagatagtccagctttggacacagcctcactggcattgtccttggtgcctttaatgtcgtaggctccagttcacatccaggactgtgaatggttttgccagaccgaattctgtgtctgcgaatgagctggagcttttgcaatttaaatggacaggcagagttcatgtactgtttcagttctcgcttgatgggccttctcggactgtgcaactttatttggctgtttttgtgtgaggtgatttttcttctgaagtgcggggggtaacgaactgggtagcccacacgttgttggggtttatagaatcctttgataattaaaccattgagccacagacagaaagaattcagaggcctttgttgccatggactgatagtaacttaaaaaaaactgaagctaaaaaaaagggagtgataatctcaagtcccctttccagtttcccccgctccctttctctcctttctaatagaagagaggagtcaggtgaggagaagagaggttggtgtccaggggagatggacaaatctctttctttggatggaacctctctttcttcctcctctgttttggattgtcagttaagacccaggggcaagctgagtgtttctttcaggagaggaaaaaagctaaagttaacatgggaaaaagagcacgagaagtacaaggcctccatgaaaatcagatttctttaaaaaaagaaatcgtttccttcctcaatacctagtggggctcagctcccagagacaagcggtaaatgtgcaggatgaaaagctcaaggtggaggaaggtttgctcctaagtcagagactgggaggtccccgaggcagggcacttgtatgaagtggggcattgagagaagttcaccttcccccagactgagttggtccacacaaaatcttcctggaagtgtggtgaagtatttcctttaaaaaaaacttttttttttttgcgacaaggtcttgctgtgttacccagcctggagtgcagtggtgcgatcagggctcatcatagcctctgcctcctgggatcaagtgatcttccctactcagcccctcgagtagcaggaccacaggtgtacaccaccacgcctggctaatttttgtgttttcttgtagagatgggattttgccatgttgcctaggctggtctcaagcctgagttcaagtgatccacccacctgggcctcccaaagtgctgggattacagatgtgagccactgcgcccagccccaaaccaaaaatgtatctctccccacccctgggtgtttatcacatttctgatgctactgaagaccccgggtttctacgttgccttcagaatctcagagaacgtccttgaaagaagtgactttttcattagatacaaggccacagccctgggttatgggttggactgtgtccccctcctcaaaacttatattttgaaatcataatccccagtaccttggaatgtgaccttatttgaaaaataaggctgttccgagcaattagttaagttaaaatgaggtcatcatggagtagggtgggcccctaatcggacatgactggtgtccttataaaagggggaaatttgaagacagatgcacacagggagaatgctttgtgaagatcagagttatgttgccacaagacagaggactttgagaagctaggacagaggactggaatggattttcccctagcaccttcaaaggaagcatggccctgccagcaacctgatcttggccttccagcctccagatctgtaagacaatgcgcttcctctgtgtaagccaccagtgagtggaactttgttccagcagtcgtaggaaacgaccacaggcccacaggacttttagggaccaacaaaactattttaattttcatttcttttcaaatcagaaggacaaaaatgaatgtaagaataatgaatacataatgatgaaatccagcctggattatatttgtcttaataccaacgatatcataaaatgtagtttttacttattttttgattatggagaaagggcttgtgaagccaaaagcacccagggcccacaaaagatgtgatgtggccctgaggccctgaattgatttggaacaggtgagtggcccctacatcctagagcagcccaggaatttgtggttggggcaggagtcagcccggggatctgggaaaagataaaagtgtaatagtctgtgtaactgtgttgtaaaatattcctcagtctttgctgatgctcctcctttcttcttacctctggcatattgaagagttgtttttgcttttaatatctgtgagaggaggacagtttcaaaaatgtctccatttggtacattgtcgatgtttggctatagctgaagcacaaagtgaaacagaagctgctacggtctcggcttatcccttgtggaactgcttgcttcactaaaatgagaaggtagagcttcaaattaagtctggactccctcattcagctcccaataggtctttcttttcaagcgtctcttcccattcacttccaaaagctatattacttatttatgacccaatccaggagaaataatacgcacttaacttgcacttgtaactgttatcctattaattactcagttaaaatccataaaagtggacggctgtcaccgaagtctctgctagaattgtcacaaaaaggagcagctcttgacaaatttattaatcagggtcttgtgtgtagttcttcgaagtcaaatagcctgagcttccaggagcccagtggcctgtgaaaattgtatcccatcctctccagttgacagttcacacaatctatggaatgcaggggatatctcttcctaacaagcagcaataaacagaagaaacctgagccaaacaaacaggtaattctaaattgacaactgatatatacacatgacgcttatagcccccattctatagaccaggggttctgaaacgagtgagcatcagaatcacttggaggacttgttaaaaacagattgctgagcccatgcccagagtttctgattcagtcagtctgggatgggacccaagaactggcatttctaacctagttcccaggtactgcccatgccgctggtccagaggccacaccctgagaagcactagtctagaggttaaccttccattggtctttttgccaataggtggtgctcttccaagagcaccatcctgcaattactaggggacgtaatgaattttagacataggaattgtctgcctgaagttatagaacttcctttcctggaaataggtagaagtagacatcatcacttttccagaagggctgtgtgcagttggaccacgagaccgtccaacagcagtgacaacatgatccacctgattgtaccctctcctgttccatgcaatttgataccttccctaaccacccactggcatcccctctagtgatgcacagctatgaaatggttgtagcagaatggtccaggataaaggcactgcaggggttcaggtctgaaagtacacttggatgctgaggcatttaggaagagctgcaccggtgggctctaggaaaggacatagtggtaaggagcggtggtaaataaaggtctagcaagacctcagttttctgtcttcgaggcattgggaaggtggcaagaacttgaattctcaccgctatgttcctttagccaaggtgtatctatttattctcctatcgaagtactaaccaggctcggctctgcttagcttccaagatcagacaagatcgggcaccttcagggaggtatggccgtagatgcctataactgtttattgaatgtttccccagtataaatttttagactgagcaaggtagagagtgttgaggctgatactctagtaggggacagcgaggcagacccataaatcattataatacatggtagacaggggccacacaaacagacttacacttcctcagagatgctctggaaatcaccatacctccaatgcacttctttttcaggaagaaaaaaatatatatcagatcagagtttgttcaggtaacagaatatcaaatcagagttcatgaactgagaggacaaggccaaaagtcttaaaccgaatgctggcctatgcaaaggttttcctctgggtgcaggagtcctttctcaaatattactgaagctgaagggccttcctgattattgctagttggaagagggagacagaatgggttgtatttcggatattttccttaataactctgacttcccgccatgctgctagcacctctgccgtctaccttaggttcctgtaccaactgagattgccaccatgaaaactcatagcccaaccagaaaacactgttccaggatactttgggaccaggggaaaaaaaggagaagactgaatctgggccccactcttagccagcagtgaactgacatccctagtgagaatcccccagccctgtaacctgttcagcccctcccctagactcagtcctggcttctgaaggcatctgcttgatccctagatgacgccttaaagttgacaggtaagcaagataattgggagaggtaacagctgaaacgtgtgttgtgaagggcatgggtacatctagtctactgtgtgtttagaattggggatggaggattaaattgggcttggccagtcaagtcaataagtctgtctccaatggtgagttgaccttcctgctggtgacacttttgctgcttcccaatatttcatcccaaatggaagtgagggattgaattttatcttcaaaaccactgagccttgaatccattgtgctgctttgcttgtgtttcctgccaaactgccttgtgaaattttacccactgagcaaagttcatctcttctatgaaagcttctcctgccacattccaattcacatggagttctctaaatacaaacatttttgaactcaccttctgtttaccttgtctcttctggaggccgaagtgcaacttggttttttttttttccttttttccctgtgatgcttagcataattctaaaggtggtaggctctcagcagcgcatctggttttatttcaattaagtagcattagtttctatccctaagtagcaaattaggcagttacgatggaggtgtcatatgctttcccaggtacagtttagaatgatgtctaccacagatttaataacacttgctgttctccctcttcttaaaagagctacagaaatagtgtttggcaatattatataaaaaaacaaccttttatacagcagctatgtttagttaggggtcaaataatcctttgttcagtatgtcttgtcacagatgtcttttatcataagcaacaaatctttctgtgttggtgaacatctctgaggcagatgtcctgtgacccagggtggaggtttattctttgttctgtgatatatttgccttctcttgaattgcaggctcagtgactcagcttctttctctcctctgaagagatgtcagtgactgttgttttgctctctgatgctttgtacttcacagagatttgcttttgtaaactgcatggctaaggtgcacaccttaaataacaccattaaataactctcttttatacccaactgtgctgcccatggttgtctgcaagtcaagtctgagtgcaaatagcagataaaatgaaacaataaaagcaggctagaaacaaataacagattgatgtattagaaatgcaggaaaacagtttagttagccattgccaaaagtatcacagagatttctagccccatctgtcacttcaaagtctctacatgattgccgttacatttacaccatgctgaatagtcttttggaagagtatactgtatctttctgcagcatgttatcaaggtgtggatctctctcaaatcagggaaacctacttttctgttaagtgtgtgaaaacagagaagtacccacgcaggacatggagaggtcggggtcccaagaaatctaacagtgggccattatgttggtgcctgtctcctatttacaaagacaaactttcagctccacagactcaaaaacgtgtcttgtctttgcagtgttcagagatgagagagcagactcaaatctctcaagctctcaaaactgatatataaaataatcattcctgtgttaaaatcagaatattacagtgtttatttaagaagagagatttctccagctgttttttcagtggagctccagatgtggtagttggcttgtgtttagggtagtggtccccaaacttcatcgtgcatcagaatcactgagaggccccatctccagagtttctgattcagtaggactggggagagactcaggtttgtattttaataattttccaggtgatgctgatgctgttggctcaaagacctcagttggagaacactgatttaggggtcacattgaatgaacagcagctgtaattaacactaaaaatcctgctgagcacagagagatgttcatcttctgagaagctcaagaggctgatgaaggattaagagtcacctctctcatctccatctcactctctgtctctctcctcccactctgccactctgttgccctcttttcatttcttattcctttcctcattcccatctcattcctttctctttctctctctctctctctctctctctctctctctctctctctgcccctattctaaccgctcacctgtgtgcagatagttggatacacataagttgggcaactcaacttcccatccactgggaacaactgattgggtccttaggcctgaaaaatcctagcaggccattgcccacgtttgtttccataactcttttctctctgctcccatggccatgcttgattatcatacctccttctgatggatttgtaaattcaggcagcttccagtcaaattttgccttccagaagctcagtaaagtgactttgcatatctctgccatccccttttatgggagatcatacagtttaactttcagatcatggtcttttttcttcctcagtacttattcatggggaatatcctctttaatcccccaatattgacaacattaatatttgcattttaattaaaatctaaagatctcacgtcaaagtgtgttatttccttggtatctcacagtaacactgctcactcttcagtgaagtctggcatgacatgagttgcctcagcccacgcaaaaactgcatgccctggggatttacccacacagactggtcatactcataagtaagattggcatttgtgtcctccactgtccttattcccatctcaatattgtgcctcatttttggcctctacagtcggtagtttttactaattcaaagaaatcaccccaagaaagcagggggagaagattgaaatatgagtaggggaggaggttgagaaggacattgactaatgcatttccttatttacctccatttccaaatttagggaactcataagaagcataattgagtctccaacttatgaaagttctgagccagaattcctccagaggagcaagctaatgccatcttggcaataaaggggccggccgcagagcaggtgtgtgcttattttccacacggtccccaaggcctaatgtttatgagagtgtccctttcaaagacggagatttctgtcaaaagaaagtagtttttgttttgaaagaaaatactatgatggggtatggggcaatatttgaatctgcatctctgaagggtgataacaggatagtctttatagaagcatgtaagtgcacgtgtgtgtgcgtagctgtaagtatgtgagtgtatgtgggtgtgtgtgtgattgtaagtatgtttaactgttcacgtgtcagggtatgtagggttgtgtaagtgttcatgtgttggttatgtaaaggggggtgtgtgtacacgtgtgtttgtccacgggtggatatgtacgagtgattaagagagagagagagaatgagaatgattatcacatctcagacaagctggaagggcttgctcaacctccctctgacacagttgaactaagctggccaaatcaggttaaggctttctagattaatttgcttaatttttttgaggacaacttctacactgaaactccaagtaagcctcctgaaatgtggtggtagatgtggtgtgtcctgagctcagggaactggctgtttgctgaagatttcccacagagagaaaagctttggcctgacttctgcacaggcaccctgactttgctgcctctcaggaatctggaaggtgctggctcacccgcacctacctttccatcttatataatccaacaatttgacactcacatcctcttcctgttagattcagtctctgttttccttgatggttactatattttaaaatgttacatagtatttttagataatagaaccttttaaaaataatctaatttgggggtgtatatgcagaaatggccctatccaaacaagacattttaaggcaacgtcttttttaaattcttgaaaactctgtgtacccagcatctgctagagatgcatcctattccatagcacagttgatttagatgaccattcaactcagcctctaagaggctggttactcaatgctctcccttcgcctattcggaacttctagcctggtatggcaggatcctaattcattagctaatagagacctcctattttccctgggacgtgtcctcctctgcagatacttggctgaaaaagaacgctgacagcaactttaagcttatgcaattcatgtctacttgtgaaattcaaactcatggctgctaataatggagatgatgactcccatgactgaataacaaactgtatttcattttgggcactaacagcagtcaactggtagtggctgcctggagtaccaagaatgccacaatagattagtgatgtctgctgtaaacaaggagtgggagtgttggtgtgcttgctctacttgcttcctctgttctagttcaccaaagaaaccacttacctttctaaaaaatataatgttattcacctgaagttaacttttcctcttagcagttggggccatctctaggcaggggactgattcttcggctaatttggaatccttgctgttttgacttttttctgttttcttccttcagtacatcttctctattttgtgtctgcctctccctagtgtcagaatcttctttcaccagaaacactcagtgttttcagatggaagcatggtttctggaaaggaaagcatcccacaaactaaatggttgctaatcccaaacacatatgcatgtttaaagagaaggcttagtattggccatgtttagaccaaaggaatgaatttttattggtgaaattcaagtgtattgtttgggggtttggggcatcattcttttctagacacacctgcttaaatgaccttatccaccatcactgacagttgtttactccatatggctcaccaaagttcacaagtttcttgagttaaagatgctgggctgctttcctgcttactgggttagcctcaatatatgacagattattattaagaggcagtgaaggtgggaggaaggagaagattaggaagaataactaatgggtatcaggcttaatacctgagtgatgaaatattccgtacaacaaccccccgacacatgtttacatatgtaacaaaccaggtgtacccctggacttaaaataaaagtatgtttaaaaagaaacaatgaaaatactgtcctgtctgtcaaaaaaaaaaaaaattcttttcctatatgaatagctcactgagattttgttgagacataaagttttcatattgtaacatacctttctatttattccttgtaaatactaaacagtgttagaaagtaaccaaatatagatatattgacttggaaatgaatccatgatatagtattaagtaaaatgaaatgatcacaggaaaacatgcaaagagaaatacaagtgagcacacacatacatgcatctgtatttaagcatatatttaaagcacagaaagtagcctagaaaatgttatatttaaaagtttgacctcaaaagagaagagaaggattaaggaatgcaggggaagtgaaaagctcctttgatttgtattctacatactactgcattttttaagatttttccagccagcatgtattatttctgtattttaaagaaggaatggttggtttaaattaattgaacgataagacaaccacaaaagaaatcaggctatgaaaggttaagaccatttggccaaattcagttcttcagaatgagaagaatggcatttcctacggtccttggtaacctcaaagtttccagctgctaacagtcacatccgagtgtcatgtgtgcacacctgaaaccgtgtgggaggaaagccgtcttcctgtatagaggaagaccttccagcatcatctagtacagatcttctcctgcagtcaactgaaggaagacaagatgcttgcagcctcatttagaactgtggactatttaaaagtgataccaaggtctgcttttgaaaactccttccccaacattcgctgtttactcttgttcatggttttatttgtgctggcgtaacaggagataaatgtaaaaagggacaagggacaagtcgtgagaagaaccactttgattcagtgctgctaatgttgctatttccagaaatggaaccagaaaagaaggaatctagcaatttttaaaaaaactaaatctattgtccacaactagccttaaagcagagaggtaagatattacatagaaaataccatccctaaccctgactacataaagtataagttggattagacttcatattttagatttaatacacagaagaagaaatcaactaacaactgtataaatgattacaatccagttgggttggattcaatgccatttgttggcacaggtcttgcctcaggacaaacctaccctacccaaggtaatacagacagggttcctgtcagaaagatcccttgcacctcactaaaattccctctcatgattgtatttaaatttatttgcataattcatgagagctttatattgcatattacatactcaggacattgggagtctgctattggtgaattctaacaatggagaaaatggaggctcaggtacataaatggatttgtcctagggtactacattgagtgactaatctgggactagaatccaggactcctgactctgttgtccccacttctcctaaggtggagtttcttttggctaaagactcatctccaggacactcttttaaaatatgtatcactggaggttggagtaaggaaagtgatcgaaagactgagcatttccagttaatgtgttgtcctctttagtggcatccatgaggctctttgtcaatgaagttttgatggagcagaacagaggtgggaggaactcagaatatggggtggggtggggggatgtgagagggaacccagtgttggggcctgccttctcaaagcaagggacaccaaaaacggggaggtaaatatcagcatcagcttcggcctttcctattggcttccagctcctgtcctgctagtggtaattacacctagaataaaaccccaacaaagggagttgtaaatatcccgcctatggatataacaacgtattagctctgtgttcagatgggataactcaaggggagacctctaccagatgcaattaataatatcttacatttatattataattttattattgtataaagtttttaaaaatctgcacctttcttatagtacttttcgcactctgacttacagttgaattatatgtaaatgtgagttacctcccctactacactttaagttttttttagggcaggatctgtgcctggctcacctttaggtgttgagaaatgaatagcacttggcatatacttgttgcattaatgaatggagcagggatgtttctgcagatccttttagtgtgttttactggtaaatgcattttacttataatattttttaaatgggagacataatcttttcttcatttttaatcccctcattcaactttataagtgaattgtgtgtctctgtaggtattttggatgaaacgaatgatgatttacttagtagggatatttttaagtggaaatgaactaatgtcctatgtttttctgtgttaatgagctgtaacttgctattcaactgaataggtaactgaagaggagcaacctagtccctacacaagcagggtcaatataattcctatcctgtattgtctaggtccaagggtgagttgggaggatgggtatattgcagatacttaatattgttgaacggtaagagaatatttgtctcttggttatggattctgtttacaaagcaaaaaagtattttagcctgggtgacataatgagacctgattctaaaaaggtaaataaataaaaaagcaaaaaggaagcatcttcttatcttgttaaattctacatgaagaatagtcacccggatgggaagtagaagtaaggttttcagttccaataacatgcaaggaaaaatggaaaaaatcctttggcattcgttcttttgatacagaggaaaaatactaggctcagtgtttcacaaaccttggtgtcccagtctccgagttaaagtggggatgtagcccattgtgagcaggtagacctttcagatacgtccactgtgtatttgccaggaggaggtgaagccaggtccaggagtgcattcagaggagacgaataccttcagagcgctgtgaatgtcaggagtgagtgcccgtgaacctctcctagagtttcacttggcaggcaggtgccccattgaaactatctccccagggatctcatgggatctgagatcctgctccttctcttactaggtgggataagagcgatggccggttcatgtaaggacagggacagattcttttcactttcacgccatttttttttaaagtcccaaacaacctgttccaggaccttctcccttcgtgcactggtcccagttgctttgcctccagataccctgggacccctgaaatctataactgtctgcattctttccttgttctgatctgtgcttaaaatgttctagttgacagtttagagctttggttcataagggatcagctgtcagcgagaggaatgtgaggctcttattgtggatgggatttgagcagagtccatctgaatccttgcttttgtctggaaacgttaagaactattacagcaatgtgtgccctaggagtgtaggtaaatctaagcaggggtctgttcactaaggaaggtatgttgggaattcagtgggttttgcaaccgtgggatattccaagtcatattaaaggttaaaaacgagcacagggaagcaattgcaaagaaggggaaggaggcacaagaatggttgacttttgagctattcttgccaaaaaacaaaacaaaacaataacaacaaaaaatgaaagcaatgggtgagttcaatgaagcagtggacttagctgagggcagaaatatttgtctttttggttatgaacagcagtgtaatccctgggcttgctggggacaaaaaccagcaaacctgtgtgagctgctgtttgtgaggtgttcacaggagtttgcgatcaaaatgattgtgaatgtgaaagttattactgctcaaaaaacactttatatcagggttaattataaggagattctgtagtataattagtgttctttctattgaggattaagggcctctcctaaatggcctttttgattgccttcttcccttttttaatttcctccttgtcctttttgattatctaccccacgaccctcagggctcctcaatgtaatacaattaaaataacatttttctgttagagggttttattttatgagctattaaccccctgcttgcctgaagtctggtttagtctccccgcatacccacccgcccctagacacagtggcgcgtctgcagccccacgggagacacatgcagacgaggctgtaggcggggcctacgcaaagcaaagctgaggaactaccttggtttggtctttcaagagatgattggatgctgattttccagcagcaacgaaagggaaatgagtcctgctggcccagctggctttcacgtaagctggagcctgggtaatacaaccttgtcccaattctgtttgtgccctgtgctgtggcaaactgccttgcacacagtaggtgctcaatactggcctttactgacctgcttaggaccatttgcctcctttgtttttgcaatcccgagacaacaaagaacgcagacatttccactttccttctccattggtcctgaccccattcatttcttagacttgccagcatgacctcttattaaccttcatttccttcattctgagcttaaagggggattctggacagtgcatgcagtgaaaagtgaaggtgactctgaaagcaatataggggaaagagtatcattttggagtcaggtaaacccggagtcacaccccaacctcatcacctaatagctatatggccttaattatgggtagaaggggaggcagcattatgtcaacatctgagggttatgcagatgttaagtgaaatcaggtgtgtaaatcatttagcctggtacctagttgatgtggtgattcaaaaaatgttgtgtgccccccaaaccaccaccactaccattcaccccttgcctttcttgcctttaccttgtgaccagaatttctacaattctgaccagaattctgcctgaagactgctctatatggcctcccttccacttcactcgtatgactgacccagtggaggacatttaattagatttatttgagggacatagtctttgatgaaatttcatggcctttactgaagcaccatggaaccagttctcaagtgactagatcccgaaaggcacaagtcacaatgatctcttgtcaagaaatttccatgggagggggtacaaaaaagaacaaaaagaataaaacagtatttcacagcacagcagggtgactaaggtcaaaataatttaattgtatattttaaaagaactaagattataattggattgtttgtaacacaaaggatacgtgcttgagggggtggacaccccattttccataatgtgattattacttattgcatgcctgtatcaaagcatctcatctaccccctaaatataaacacctactatgtactcataaaaattaaaaattaaaaaaatttttccatgggcgatagaaacatgggtgccatgaactaacaaagcaggaattaaataacaattgagcaccatgatgcatatcactaagttacacatgattaataagcaagtaaatagtccaggtaataagagcgcagaaaatatagagaaagacccatgtgagagtgggaaagagaggggtgctggcattgtgctaagctgaatcgggggaaaagaagacattgaaatgcctaaactcgtaagataattaaaagtgtccattccaattctgaatgtggcacttctgaatatggtaaactagattgaaattaagtcaattttataatcgctaatcagaaagacctttttccttgtaaaatgtgctttctgctttgataaaatctgaatgcatatgctttaccattcacagattaatagttgtttaattttagaagcgtcacctagacaggtagaactcaccaaacataggcagatgaagctacagagctatcatgaagggcccagtgtgaggagcggggaggagggagccaggacctgggagcacctctctgggagggtggccagaagatctcaggcacagtattcaccggaaagtggtgggaccctcattcattcagtcaacccacaccagcctttcttaaacacctgctatggctcatgtatgcctccaggtactcaaaattagaaagtgagcaagacccactcttttcttaaggagctcgccctccagagacacagtactcagatatgggagctcctattaaaccggccacagcatcagagaagatggggccaatattcaagaagttccctaagactaggtaggacacagcatcggagtcctaaagtcaaacaatagggaaagctactgagtccgagcaggaagcaatgggcttctgtcccatcaggagacctggagagcccgaacacctggataaaacacaaggagccgctccacattcaaagtgtatgggttcaaatcttggttctaccacatactagcatattacataagctctctgtgcttcgttttcctttactatgatagggataataattgtaacaatctcaaaagattattataaagaataaacaagaaaatacatgtaaagtgcttggaacagtactcaacacataggagccctcaatgaaagttacctgtgataataagaattaccatccttgttatcattgttagtgatctagcagggtaattgtatttatcctttaagaatttagacccctttatttcccaagaggatttgaggtggcttataataccacatagagtatccaagataaaaattcatgaataaatccgggtggaaagaaaacaaaggtaggaatcataacatgaagccagaggtaaagtcagtatacagattgcacactatcagatttggtacatttgctaagccttaagggaattaacatctttacctcaagcacttagtttctctaagataaggtcaagggctacagtgttgaccgtgccacacagatccatcttgtctctggtgcactgaagaaacctctacacaactgcacatactccaaactttttcctttctctcaccctccttgtggattgagagcttgccttggtccttcttgtagcctccaagccccaagagcaagatcttgcatgtagtaagcactcaataaatacttcttgatttgttatttgaatagatgaataaatggatgtgtggatggcaggatggatggatggagttgtgtgtactcctggctagagtcctaactgtgactctgataaagtctcatgagtttattccatatttgttttagtgtgaaaacctccagggaggattatttgcagataatctattgtttattttatttagggggatttgatgtttcaaatcattacactgagaaagtactcaactagtttaacttagtttctcctttgctttttccctgcgccttatgtgccctgaggggaataattttcaaaaaaaaaagtaattttccacaaattttcaaagaacatggccattttatgtgagtgggggggggaatggttttgataggatcacatttgtcaatctcaaccagttttgagatgataaacagtctatttttctctttcagcaaacctttttcaacctatatgcgcatcgaaactaagggtagctgctattgctaaaataaaactttatatgttaagccatttatttatgtataatggttagcctttttataaaatctagttttgacaatatctttcttggataaggagtccctatgtatcatttaaataatacataaaattcttatgtatttttataattattgaaaataagtgaagttcaactgtctgcacacccttgaaaatctcagcagcctaaggacagatcatccagagagctggggtttcttgcaagctagtttttttctatctttgcagagatctggtaagaagttaaactcaagggtcagtggcaacatgctcacctgcaggattactttggctgcctgactcactgcaccctgaccacttctctgggaaatagacttggtgtttgtgagacgtggagagggaaggatgagaaatgggaaggagggtcttcacatcttgtgttagaaatgttcatcagaatgacagggtctccactggccaaggttgtggtcctcctttccagtatttttcttggatgactacaggacaagactggccaggaataagcagagtccagccttgtttgtgagatctggcacggagcacagatcagggcaacaagaaagcaagtccagggaagtcagctgaaccagagaagagcaggtggacatgatgtccttaggtgggactcttgattgttctgaaagacagctttctgctggtgtcagcagcctgttgcatgtgggtgatccacgtccctcaggggctaatcagagccagaggaaggtcagagagctgcacgtaagtcctctacacaaataaggcagaacagaaacactctgtttatttgtacatatgtaaagataaaagttctaagaaatagtgcagtgagtgatgggggaagggtgctgctattttagctgcaccttaatttgtggggttatctttgtgattttatttcctcttcagtttcactcactggaacacaagctcagttctttaatgacatatagagaattttatgtacttatgtgaatgatgtaccatatgttgacaacacatggaagtcttcttgaaattcagaacataagaaaataaataacaaactgaaagggaagagaatggagttaagggagaaaagggcaggaatcaataatgataatgtgaactgatgttatttctttgataggttttcagtagaaaaggtattggtatagtttcagtaattgtgatcatttagactctggctgggctaaatctgtgacaaaatgatttgctaagcaaatgaatacaggcatagtttgtttaaacaattgatgtgtttctaaagggttggttgcacgccgtctagggcgagtccttgagtaaaatgagtcaccatccagtaaggaatggccctgaaagagacagacttggtctgaggagcaggcacctcttactagagatgaccctctgcagaaataatctttgctcaaattgcaaagtgttttactttttgttttcataaagaagactgagccctgattttatctgttttagaaaagctccatatataaatgtttcctatatctggtttgtgcaaaatagccttgtgtattgaaggtgtaaataagttttccagccattattttttcttactagaagagaaacttgtttactagcagttaagaaatagctatttaccaagttctttgagggtacccaggtctgcctgccccacggcacttcatactgtgaattccacatagcagtactcaacaaatctggtctgtatgagtaaataaatatatacttaaataatgtgcatgagaaaacataaataagaatattattgtaatggaagcccagccttggtctcctcagggaggtgcttggctattgtggtttcaatttcctcttatctatttgtgacttagaacatacactaggcaaatttatttgtctagctcttgagaccatgtgtaaaataacaaaactgttttctgatcactctgattttttgttaatttggactgctctccccgcccggcaattggtgcagcttaatgaggtcatttttgtggatccaccgatctctctgcgagatgtttagtcaaagaacccacggcctctgtttctctcttctgcccctgactcattccatgacctttaaaacgaaggcatcgttaccccaggaaaggaggttgtattgattgcacttgagaactgaggtttctgtgtttctctgtttgtttgattgatggtggatgatgcagggaaaacagtgtgcggggagactctcaggtgtgggggcaggaagtagtaagttcgagagtaccacaaagttctccaggctgaaccgagagctggctgggggttttggttacattgtgcttgaaagccctaggaagcccccagtcgaaatatggcaaattcaaatgcaaggaaagctgaagaagtcatacccacaaactctgggaaattacagccgcccgttattagtcattcttacgggcaatagagagtgttgttttaaaaaattcaaatctggtgctatgaacaaagacctgttctttcctggaccagataatcactgccaggatcgattcgagaaattaataggaggccttgtcctgtgctgccggcaactttgtttcttgtcaagtgcagccctgcacacaggtgtccctaagttcctggggaaccatcagcacccagaataccacaacacgtccttatttacacacaaatactgagttcctgaggcaagagggaagggcgtgaccatgaatggaagtagccaccaatgaggatggttaaatgtacccttgataaaaggtgactgggttcgttccagtatttttattggacagtctgggtttttcaatggttaacttagattatgttagctatcgtctgcctctttctgctcgcattaaactttacaacccaaataggactctcgcatgccgtcttgccgtcagggcgaggactacatcttgtggggtgaatggaggcatcaggctagctcccgtatcacagcccatgtattcaggtgtgttaggccttaagggactcaagagaccttcatgggtgtgagatgctgatcctatgtcacagaagaagcacctagggcaggtcatggcctagtgtttacagtaacacacagcagtatgagaaactcgattttaggctcctgcttcctgtttagtgcttcttccgtcttcaaaatgccgcctctttctattttatgacaaagactggaaaaggaacaataaaggctgggaggtggggctttgtagacttgaaatacctctctagccaggtggtatattttgcattgctgaaaggcaacactgcaatgtagctacgccccgtatatttagagcaagctagcttcttctgaagcacacaacatgtttacctgtgaacctccacccccatcccaaaatcaatttttccggtacccaagcacctccaccaacccttgaagtaggagtctgcaaggtgaatttcctaacaagctgacttttcaaaggtttttcagctctcaaaaacatgaaagctgtgtttaaaaatttaagggtctgatatgtaccagttctgtggagcagcagcaggacgtagctttttgcagtgccatgattccccaaaccccaactctttaaattaagatgtttatgacagctgcttgtgcttaaaggaatgcacataagattggccattaattactgctctcgggtttttgcacctattctctgcatttcacggcaagagtcagtattgttgtgtaaactatttttagtgctttttaagaaaccctatattttgtggttttggatttttaatcttttattgtgaaaatttccaaaaatactcaagttgagagaaagtgcagtgctccagtgaacccatcattcagcttcaatgaccatcaacattttaccatcgttgtttcacttacccctcctgctaacacacacacacacatttttttattttgccgaagtattttaatgaaaatctcagacatcatgtcatctcaacactaaatacttcactgtatatatttttaaatatgtttatataactataatgccatgatcaaaccaaaagaaaattaataattctttaatgttatataatattgagtccatattcaaatttacagttgatttgatcaagtaaagacccaaacagttttcatcaggccttttgcatctttaactagaaatgccacacacacacacaccccccccacacacacacacaaagctgattgattatctttttaaagagctcaaggccagtccttgaactctgacctctacacctcactttcagaacggcacgggagcctgtactaaccagaaactttgcctaggtagtaatacagagctctgtgtcaattgtggaaatccttcaccttttagaattattttcttgtggtaaatatttgtacaattccttttgattttcatcagtgaaaggcacagggtcttgatgtgcctttgagagatccttttccacatattaatgacttcctcatctgcttcctgccaagttttgtactttgggttagaaagaggtcaagacatggatggttagatgaattccttgttacccgagctttgtgtattaatttctcactactccactctggctctagttagtcttttaaagtcagtttgcaacatggtgacaattttgacaggaaagtcaaatttagctaacaaccgttattcaatcgaatgtgattaaaccacagacggatacctttcattcatttagccagaaaaccttcttatagagtgttttttctattcaatttgtaaatctaacgttttttcatttaccggactcatttttaaaagtgaggagtgaccattttctaagtgaatgtctttaactctctgctgtcaccttcactttgaattccccaacaagaaaaccacctttagaatgttggcaggtgtggtgtttgcttctgaatgcagcatcagggatgagatgggaaacttgagcattctagcacgatccttctaccagtaactgatgaacttagaagaataaaaactctgcccagtgatgtccagaccatcatttcttttgcctatatgttgaactaattttattatgccaactgtaccatagtgacataactttgctgttacgaaggtcctatccgtagaacaccaaatcttagaatgaaaatgcaatgtgcctgtaatcccagtgcgaggccaaggtgggtggatcacttgaggtcgggagttcgagactagcctggccaacatggtgaaaccctgtctctactaaaaatacaaaaattagctggcatggtgctgcatgcctgtaattccagctactcaggaggctgaggcaggacaatcgcttgaaccctgagggtggaggttgcagtgagcagagttcacatctttgcattccagcctgggtgacagaacaagacaatgtctcaaaaaaaaaaaaaaaaaaaaagagaaaaagaaaaaagaaagaagaagatgtgaccttattaatcaattatccagagtttttctacctaaactctagctaatctgggagctggttgcatttggagatttcatctgtattttttatttattgtctggcacataataggggctcagtaaaatgtgttagttaattaatgacaatgccaaatataccaatttaggagtgatgacagaagacaaaaaaacatgataaaggttttataacttactgccaagaaaggaagattgtaccttgccttctaactgccagtgccataggacttttattacatgctataggtattacaagctatgccctcaagtctttcctgctgggaccatggatgaagaactgacttggggcatgatacttgaaaagaaagagaagagggtgctgctgtttgttgaatggttgcgtacaaggcactgttctgggtgctgtacattctctcatttatctaccataacaagctcaggggtggatttccactttgggaaaaattctcagaaactgagttttccctctgcatacataccaccacaacaataatcaacacagaagacttctgtgaccacatgcgtgggagtttttcccacacaccaagtaacagacaccatctgggtacccttccattcaattctaacactgtttacctggagatattgtcagatcccacaggttgaaggctcagttcccacaactgccccccatgctttcagacacgagttgcaagtccaggcctccagaacgtctggccaaccagctttaagttgagggtcccaccaccctctctttgggttcaattaatttgctgaagtagtctaaagaactcaggaaaacatgtttaccagtttattatagaggatattgcaaaggatacagatgaggagatgtttagggttaagtatgggggaaggggaacggagcttccatgccctccctggggcaccattctccaggaacctccacatattcagctctgaacccagccctcctgggtttttatggaagcgtcatgatatcagcattatctctcttcagagtatagggtgggactctctctgaggagggtcttaaaacctacaatcagaaaggtggggaaagagtagagtcctgctttggggcaggtgactgtagggcaggagaagatcagagacctgtccctgaggcctcacacaatcaacattataacaagactgtaacaaaggatatgggagttatgagccagggactgtggatgaaaaccaatatatatgatcacaccacagtatcttagctccatattacagatgtggctcagagagaattacctggcctgtaagtggtattgatgaaattcaaacccaagtttgcatgcttttctccctggaccagtgcaacaggctgtctcctttaggtttgcaactgcaagtgcattcagaagagaaggaagaaagatgatacaaaaggcggtatctctgaaggaggggaagattcacagggaatatggcacctcacagaagtctaccatcctagccataaaattggctgtagcccacttcttgccctagtgagagaacagtgttaagtgggcttggtctagaatcttgctactcaaagtttagtccatgggctggaagttgtggcatcactcggcaactataagaagtgtagaatctcagggcccaccccagacctactgaatcagaattagcatatttaataagatctccaggcaattcgtatgcacattaaactttgaaaagcactggcctagaggctggtgggaaatgataattaaagatgctgactgagtagttctagtgtagcgtaagatcatttgtgggtgaaggcaattctcctacattaggttgagaggaagaatcataatttttttacataattcattgtagcagaatttctcccaactgtgaattttaagactgatgacttgaactagaaaatggatctttccttcccctaacattttagagggatttttggctattaaatggtgagtgtgtttgtgtacatgcatacagttgtgtacatttacacaaacacaactgtgtacacaattagaaaaaagctagctcatgactttcttggaaactactgttgggcactgtttggaaagctaaaggaaccccaattgtgtcattatattccctttctaaaaataagattttggtgttatttttcaatgtgcagaacaatttgtgcaatttttgtgaatgcaaaccttcaggaatgaatgaagttgtggttttcatagctttgtttgtccaggcttcttctattctccttagacaatctccaaggaacgtctgtcatgaggcaccacgtgaaggtctttggagaaacaccatgaaagttgaccaccagcctgtcgctgggacactttggaagaaagctaacaaaggaagaagatgttttacagctgactgtgccacatcattgtgttcaaaaaagtttctcattattcagtggtttcgaacttccaccactaagattcttatccactttcatgcctctttgcttctcactatgtccttgtatgttggattcctgctccttgtaggtcttcccatggaaatgatgacacattgggaggtatggccaaggccctgcatcacaggctgcttgagaataaatcgggtgtttgtgtagttattaaaactcatcctctctcacaaaaagagctagaatcagaaagtcttacaaggcccagcactttccaacagcatagtcatccaacctagctatcagagttagcttggtgagatgaaaaattcatttgatgggaagccaaaagacttgaattccagccccatctttacccctcacttgattttggtcatagtctctcaactctcagggattggatggctcttctgtgaaaagagggcctcatacagcctcttctggccttctaatctgaggatgattacattattcagtctataaaataatttatagaccacatttcaagtgcagcaatgttcttagatggtcacacatcacatcagtatattttcagattgaaaaggcagagcccattttgacatcccaagatcccccttaaacacaaattttctatgtaagaagaaaaatccttctttaaaagagataattgaccaggcacggtggctcacaactgtaatcccagcactttgggaggctgaggcgggtggatcacctgaggtcaggagttcgagaccagcctggccaatatggtgaaaccccatctctactaaaaatacaaaaattagctacgtgtgttggcaggtgcctgtaatcccagctactagggaggctgaggcaggagaatcgcttgagcccaggaggttgaggttgcagtgagccaagattgcaccattgactctagcctgggggacagagcaagactccatctcaaaaaataaataaataaaaagaattggccagatgcggtggctcacgcctgtaatcccagcactttgggaggccgagaccagtggatcacctggggtcaggagttggagaccaggctggtcaatgtggcgaaaccccatctctactaaaaatacaaaaaagaaatttgctgggcatggtggcatgcacctgtaatctcagctacttgggaggctgaggcaggagaattgcttgaatccgggaggcggaggttgcagtgagctgagaccacgccattgcactccatcctgggcgacggagtgagactctgtctcgaaaaaaaaaaaagagagagagagagagagataatgaagaaggtgctaattcaatttcttctggatttctagaggccccggttttgccaagtgagaacagttcactcatttgaaatgactagagagcttcactttattaccctgcaaagtcttagcttgaaaggctagggtcagcagtctgccagttggcagctgttactctgcgttgcagatcctgttgtaatcaggtgctttccttagaaaattaaaatgatgatagtagtttatatgtattgagcccttcatagatgacaggttccagaacttggcactgttgttaacttcactttactgtcatggggactgtggcatggagacgttcacttccttacccaagtcctcatggctaggtagggtgaattgggactggaacacagacagtctgaggatattacatcacctccctcctgtgggaatattcctaagggctgaatatgacttggttgaggaggagagaaaagtgaggagagtggaatgtacgggggcgtgtatttttaaatgttcttttaattttggatcttttcctcctcgttgccactgttcagtctcagtttcacaaaactcttcaaatatccattcagtgttctctgagaactgggaatgctgacagtaggaaccaagaattttaagtacagaattaaacattccctttgtctttttgccaaactgataaaaggcgccattggttttcttagtgggtaaagtgggggtaggaggagctgaggagccatttcctcaaaccaagtgacctcttcagcctcagactgtgaagggaggaatgacttgccagcgcccaggttagccggacaccctactaagggggaacattcctgggcttctctggcatggattgctggctttatgacatttgttttcttttggaagaagattatattaataactatcatctacataatttagaacaatttggtatgatcttttattgccagggaagccctggccacagtctgaaaaaaagtaaaggaaatgaaaagtctgtttgccttgctgattaaggtaacctaaattgttgtttttttttccctgcttaacccaggttcaaagtattcgctctgttgaataggatatgtgtccaatagctgtgagcagagagaggtcaggctctcttgtccaagagatagtattttcatcttcagggtttttctcccatagaaagacaaatctgttctaagtcaagcaactgaacaacaatgtgaattctcaccaagtggtgtcattggttctggctgctggggaaccccgcgtcagggaaataaagaaaagctgagcaccagcagtcacaaaagccttcctggaagcagtaggactgtgttgagtcttgtgcagtttgcaagaaaggcttgtcttctggcctcgggaacaagtaccagagcttgaattgggtccagtccgtcatgtaatgccttgcaatacactgggtcctatcgcagatgactgcagaagttaggtggataccttaagctgtctgggtacatatcaaaaggataagccaaaataaatccaaaccatcatgcaaacccagtgataaatggcaactgacacatgaccttagttccactagacaatagagagtgctgtgggttatgttgaccagagagtttgtgtcctggctaaagatggcagtcactcatttagaccaaatttagttgtataatgcaggaacaaagaccttgtattgcctattttctatattcaacaaaacacacctttttaaagaaaacatctagatgtttaaatgttggaatatacttcaacttttttaaaaatgttagacaatcacttgtaatccaaatagaatatgtagggaacaactggtataccacctctggaataagtcttcatcatccccaaattaatgcaatgatattatcaacatgtcctatgtaggatatgagtcccatttgaaagtatcagccacacttgctaagatttctaatattcatagaagaaaaatacactgtcactgacaattcagatttcatttgtttaaaaaaatctgtgtattattagactacgtatcacaaaatagttttattatactgttgcagaaaaaaagaattgaaaccacttctattataatttataacatcttgagggtgactgtgggaaggctaaggaatttgctgttttattatcatataatttgtttcagtagcggtattttaaatgttggattttcctagtaagtcttggatgcaaaggtgggttgctgacagggtttgagaaacctggaggtccaatcaaaggttaaatcatcttccccaaaagaaatatcttctttcttaagcccttgagctgaaggtaggaccaaaagagacagaaggttagaaaactgaaggatagatgcaatcgaatttattagccaccattaggggtgcttctgacaagacagaggaaggagaccctcagcctagcctcctcttcaaccatagaatagcactctaaaggtaaacccttctggttcacagtgtgagtgcgaggaaggaaggatgcaaaaatggggaagaagagccaccttttattaccccttactgaagttgtcttctaatcaactgctgcctgaaactgtccatcttcttgagtactgtaggcaactttttgatatttattcattatacattcatttatttaataaatatgtattgattacctgttctatgctggcagctacttggacaaaaagaagttggcagctaagaaagaaagatatgtaggcctgggcctgcagaagtatgcagtttagaagtaggagtgcagagtgtccatgagtgactagttccagggaaagtgagaaatacacatagccttgagggcacggagactgtgttgggagttactcaaagcagggacaggagtgacccgtccttatgaggccgtacagaggcaaaacctcttttgggataaatgtgcccaaattgggctgcaggggcagagcaaggctggagaagctctgatgatgtggagtttaaaaagcccagaattctagtctcagcacaccacttcccagcagtgttaagcatggagcttcctttctcattgccttgtctgcccacctctaagtgctggagttggagggatcatctctgaggccccttctgctgaaagacctacaggtcctgattgtttgtgtgctctggagcatagaggattggaggtttgcctgggattcttcatgcggggccctccctccctcttctgtgccctgggaccagtgtagtaagcagagccctgcttttcagaggcaccacaggagctgtccagaaagcccaccaacatcatcccactgctcaggaaggaaattgggttgcagccatgagaatgtgagtaaatgcatgccaggtgaaggccacccagccattaatagtcaacttctcatcacagagctcttgcctgggttgagacttgaacatatcctgcaccacatcttagacgggttacttatctgcactctgattgaagacttacagtggcagcattgtctgttctattttttaatataactaattctgttttttatttttttgagatggagtttcgctcttgttgcccaggctggagtgcaatggcgccatctcggctcactgcaacctccgcctctcgggttcaagcgattctcctgcctcagctgcccaagtagctgagattacagtcatgcaccaccaggcccaactgattttgtatttttagtagagatggggtttctccatgttggtcaggctggtctcgaactcctgacctcaggtgatccacccacctcggcctcccaaagtgctggaattacaagcgtgagccactgcacctggccaactaatttttaacataaggagaaacctgtcttcccaagtctaagtgcaaggcaagatagggctttgtccagagtggcataaactggataagaatccagtctctctcctatcgggcctccagccctgagtgtttctgaggcagtgaaaccaaggtaaaaactcctgacagaccagacacatgatattcaagttactacttccctcctcagcagaactttcagcccccaccttctaaatgcagccactgcctcacatgtggcatacagaggcagggtggtctaaagcaacagtccccaacctttttggcaccagagaccagtttcatggaagacaatttttccacagagtggggcaggagtgttgggggatggtttcaggacaattcaagcacattatatttattgtgtactttattgctattattattacattgtaatatataatgaaataattatacaattcaccacattgtagactcagtgggagccctaagcttgttttcctgcaactagatggtcccatatgggggtgatgggagacagtgacagatcatcaagcattagattgtcatgacgagcgcacaacctagatccctcacgtgtgcacttcacaacagggttcatgcttctttgagaatctcatgctgctgctcatctgacagaatctggagctcaggtggaaatgctggttcaccctcggctcacctcctgctgtgcggtccagttcctaacaggaccagtaccaggggttaaggacccctgatctaaaggaaaacaatgggctttagaatcaaaggagctcgagtgttaatcctcagtctgttacttcatagatatcagattttgcatctttgagtttcttaatcaataaaatgagagtaatgctaatggtttctcagagttgttgtagaattaaatgagagctgtataataataccaggcacatagtagaaactcagtgaatggtagtagctgttaattactgctgctgaaaaacttaaatgtagtcacttcaaagatatgtttacataaagttaatcaagctagggtgtgttatattgtagaatcccaccacggatctttctgatataagttttgggatgtgtaggcctggaggaagggatggaaaatcaatggtttcctgaaggcctctgggattttccccatgctcatgggctcaggagcttccctaggataggaatgactagctgctcacgtattctttgctagctatgcaggcactacatcaaggccttggtcctgcgtggctgtggtatttgaggttcataataaagctgactgtagaacatggattttaccttatcatcagtatttgttttcaccctgacccctggatgctctgttagggaatagatctgattcacttccttttcagcattctactgcataaacaagcctgagctctgatatataaataattctaactgaataccaaacagacttagctgctctattgccgctataccctgggaacagggttggggggaaagtgtagggaactgaaaaggcttgggagggaggggaagatgttaggatttctatgaagagcctggggagttaaatgcaataatttttgtgcaagtgttatggaaaattccttcatagccctttattcaatagaagctatttgtaagtgtttctcccacccaccctgggacacacatacaggcataaaatgacaaagaactcaacttctaatgcaagccagagttgaatgccacttggatgtgatgttggtaacatttttttttcctttttttttttttttgagacggagtctctgttgcccaggctggagtgcggtggtgccatctcggctcattgcaacctccgcctcctggattcaagcgattctcctgtctcagcctcccaagtaggtgggactacaggcacacaccaccaagcccagctaatttttgtatttttagtagagacagggtttcaccatgttggtcaggctacattttgttttaaaaaagaagataggtacctaggagagtcctagttgggctatcaacacgaataatacagagggctcctctattgccagaatgctagggagcggttcaaaggacctaacagataagctctctatcctgaaaaccctaaactctaagcctcagtccaaggaggtgacagttagtttggaaggagaggctgagcatacatccacaaaaaaggcctgcaaatgggtggtaaacatgaactcaagtatgtatacaatgtgttctatacaaatcctacagggtggctgagaggaacaggatgagaagcagatctggaagaacttagtatgtgccccagtattaaataaggggagaggctaaacttagagagtagggtgatattccaggctggaggatggccagtgtaccagccaagaactggacacaaatgggaacttcatggaaacagagaagagctgtgggagaggaagaggtcaacgaggttattaaaagaggatttatgtcagtgggtggacttaaggaccagttgagtggcttcaagaaatagatgaccgtgggccaggtgcggtggctcacgcctgtaatcccagcactttgggaggccgaggcggacagatcacgaggtcaggagatcgagaccatcctggctaacacggtgaaaccccatctctactaaaaatacaaaaaattagccaggcgtggtggcgggcacctgtagacccagctactcgggaggctgaggcaggagaatggcgtgaacccgggaggcggagcttgcagtgagccgagatcacgccattgcactccagcctgggtgacagagcaagactccatctcaaataaataaataaataaataaataaataaataaataaataaataaaataaagaaatagatgaccatggatgcttaaagggaaatattcgtacttgtatgaggggcaagctagagtcagagagcaggctagagtgaattcaggggactgggtgagatttcttctcttcgcaacagccagaatggaagcttttccattctgagaagcttcagtagatgctcacctgtctagtggcaaaccaacggttacagattccagtggccaattgagggccatcggatggacttgttgagttccaacattggaaaaagtggtatcttccctcagagcatgttgtatgcctccatttgcacaacaagtgacattattagtgtctttctcttgtaaaaccactatcaacttctcctgagctaggtaagtaagaatcagaaactatttattatctcaacctgtcaaaaatgtagttcacatcagaggcaactagtttgttaatttgactgaattttctcttggaggctttttcctttttgggaggtaattttagctgagccccaactctgcagagagcttgtcagtggaagagtttcaagcttaggaagtgctacttcggcttttattttaaggtttgctccctctttgcagaagcactctcttcctgttcatcaggtattgatcaagacagtggtatgggcttctgtctccagagaggatttgtgacaatgggaagctgaatttggcccatggaatgtttaaaagtgaaatggagcagcacttgcagcaggacaaatacttccctctctcaagactcaggttgtgatttatcttgatacaaaagatgtagacttgtagtgtatctcctattgcttcaacagatagaagctaccaaaacagattattcaatcccctgcccctttcttaccatactaccttccttcatgccccacccccaaaataccccatacagacccactttgcagagaacaatggacagactccaggcaaccaaacgtaaaaggacaatgagaaaccaaaccacagccacatggctgatgtgctgcttgagggtgctgtgtcaagcagcaaatgggaaactgaagcaatccgtactacccatgctgtccttctgaagaagccaccaggctggaagtcaggtaatgtgggttctttcactggcaaacctactaaaactcatgctacatgagcccagctggtggaaaaggcaaagcattcagtcaaacgatcctgtttttttgctcaaactcaattgattcttcttgtcaatgggtggattcggtgctttgaggtcacgcagatctagcctaaataactatgcgtgtgccctttttaccgtgctttctatagctccatttcctcacctgagacatgctgatggtgccaatgaaccttcataatacctgccacttccctttcacctggggaccctaagaggattaattagatattatctgtaatatactttgcactccttggagaaagattctatataaaagcaaagtattattatttctaagagagatgatacttattagctccttgtaggatcattaagcaaatagattatacttccctttagagaaattatctcccagttttcctaattcttacagtctatagaacagaatatatattttaaaaaattttaataataaaaaaatgtcagttggttggttggtgaagggaatgggatggatttctaattctaaccataacttcagaagcttgtttttaaggtcttagttaccaaagaaaatagacactacaatcacctctctgcttttagaaaatggccttgtctcgacctttatcataattgcatagtaaagacagctctacagttctaagtttgttcattttacggccttttgcccctacaattgttgaatcctttgattaaatcccattgtagttaagtaactgttcagaaatcacagggtcatcattatgcacatacttgtggtgatagtctacaaattgataatgtaagttatgagtggaaaattttaaatccaaactccagtccacagaaatttcagggaaaactcaacccaatattcattttgtatttgcctcattttccacattgtgtaaaaattccttatttggcatttaatacaagccctgccttcaaatgaaaccagttcagcatgccctgtgttttggataacaataaaaaccacctaggtttttcattgtgtaggtagggaactgctcactttttctttctttttttttttctggcacaaaaatgtcataatgagaacgatactcttactaggaggaaagcaaaacaaaacacaaagcaaaattttcgagacgaaaactcagagcaaacgtctgcaatgcctctgtgggctcacgaaaagcattgccaaccctcggcagtcacacgtggaagctcatgccaatcagatgttaatccattaaactcattcacagcaaaacataatgtaggtcagagtggggagcaatgtgatgtcgtgtgcaagctcatttaccatccagagcaatatgagtcaggggtgcaaacgtggagcacttcaagccaatattgtacaataccgaaaggtaaccatggtctggaactgaatcaataaccaacaaggcttgctgtgagggtctctaatatagtattctgtgaatcagtgcccgtccgacctagattacgcatttgaagtaccctaaactttagttctatctctacgttctttctatggcattcctggtcatctttttcaagcttttattttatttccttttatattttatttcattttgggaggttaacactcctctctgaaagatttaagcaaaacctagccaaatactgtgaacagtaggggcaagaagaaagaagacaacagaaaaccttgcccaacagagccctggccattgtttttattttttttgcatctcagcttcctcggccccaccctctaggagtgtgcctccagcacctttggggagccacccaggcagtatgacacccaagtttgtgggttgtgtttgctcttaggatgggtgtgatgccgggagggcagcaacacccttctctccttgcaaccgcatgccggtgtggcccctcctacaactcacctccaaaccaaaccatgaaaaagcaccagagaagagccgagatgtaaacacctcgggagaaaccttaactttagacttcgtctattgaagcttggagtggcgcatttttgtcacggctgtgttgcctagagtcagaggtaaaattccttgagggtaatgaagacttttaaagcacgttgtattagaattgatgttttttgaaagcagttttagtaaatgatcaaaatcaagttcattttattgtacccgtcataaaagtaaaacaatactcactataacaattatggaaaagacataaaagtagaaaggaagaaaattactagatacaatcacagttaaatttttggtatgtgtccttctagaccttcttccttcccttctttcctttttttttttctttcttcctttcaagtgctcaaatatttcttaaatcccaggtactgtgttttcaggtgcaaagatgaggtatctggcaatatattgctctaatcagaacacaggatgtgtaagaatgcaccttaaattatgacatagacttctccattcatatcatcagaaaggatgtgtgatgtgagctggcaccttctcagtccctgaaataaccagagaaaatgttagggtggcatcaacttaatcgctattaagaagattaagcctcctagctctagtagtaaaaccggcttgtgactgtccccatctaagctgcacaccctcccaccttagatccactgctgatcagacagtgggatgatcataatttgtgtgcattaaggcagagggatgaacacgtgtgcccctctggtgttctctgtgcgttctatgttcattgaagaacacagagccaagtgggaatgaggccagcaaagcaactggctttcagatgcaattttctgtaacacatcttagtgctatatttgtcaatggacttagggcctcagagaactttccaaggtgaaaacctaacattgcttccatgggcgttgagggtaaagcccttaaccctgcgacttaatgagaacaaaattaagtgcttctttaagcagcttagatttatcttgtcaatatatgtgatgggaggtttctttgtgtgctttagaaaagagattgtgtgtgtgtgtgtgtgtgtgtgtgtgtgtgtgtgttaatctgaagcatcgtctccttgctccattatgtcaccatccacactgttcctttatgatagacagggttcatctattcccttgctctaaacttaattactttgcaattaattctttgttgaaaatagcaaggctcctaaactcggaacatctcattgtgagaaaggctgtttatggatagaggtcaaggggacgtattggaatattccgcagcactgccacagatattttgaatgaaaatggcaagagggaaaaggcccattccacacaaggtgaccatggaaggagagggcttcctcccaaacaaaccgagttaaagtcagccttcaagaatgaagttttaaacatagcatcatagaaaaatctcatgccagtaatcttaaggaactaccgtttttaggacctaccatgtgacaaccacttgcacatgcattgtttcagttaatccttgtaaaattttccaagctaggtaacattaatattaatactggcttataagtgatgtgacttcctaaggttattcacatacccttgaaggagttcattccacactggtcattgcttgatggtttgcagacataagatccttgaaactggccaggcgcggtggctcacgcctgtaatcccagcactttgggaggccgaggcgggcggatcacttgaggtcaggagttccagtccagcctggccaacacggcaaaaccccatctctactgaaaatacaaaaattagccaggcatggtggctcgtgcctgtaatcccagctactcgggaggctgaggcaggagaatcgcatcaacccaggaggcagaggttgaggttgcagagagcctagatcgcaccactgcactccagcctgggtgacagagcgagactctgtctcaaaaaaagaaaagatcattgaagccgaattacaaccctatgagaagagtaccatcattatttcagtttcacagaagagaaagccgaggctttgagagggtaagtgacttgcccaatgttccaccgctggtaagcactgatcccagcctcaaactccatcatctgcctgtgctctcagctataatcctaaactacctctctcagaaagatcttgtctttatcctccaccagtttgtgaaaactgccttttagagcatttcctgcatgttagttgatcaattaagcgttcctcgggagggtctaagagggaattacagaaatgtgacctttatgagaagttgctgttgtcttacagtattccaggcctttgaagagtcaaagactgatgtaacaggctctgataacctcacagcccttttaaaacactgcctcatcactcttccctccagacttctgaggtcactggtgagcatgtttgcaatacggaaggagaggagcaccgttcctctctctcctatagaaacagcatgggcccgcaaggacaagggcaggaaaaatcacagcagaccgagtcggggacagggcactccccggagcctgtgctgcgggtggagggcctgggcattgtcagagttctgcatgtggtaggtgatggataaatattgcggtgagtgattgagctagtgaatgcattctcacagttacaggggagagcagaggcagtacgtcggtgagttccaaatcctttgttcaccggacactaaattgagagaaactgaatccccagttagaagtttctctgtgagatcctgtgagatactgactcacttcctccataaacttctcctaacttcttcagtcccctttgatccatggtggttcttgcccatgtgaagctttttttacactacttctaggaagctaaggtgtttgcataaagctgtacctttcctgaaggcacatttgattcattcagcaaatattcaagagatattttccaagaagctattatgtgccagacacaatggcaggggcttaggatcaagagataaaagatattgtccgtgtacttaattggaaggagtgatgttctatattctttgagagggaagatagtgagggatgaatgtacgtggtgggagtagtgaacagacagacaagtaaacaagagaatggtaagtgcagagaagagtaggccgcctttgggtgatttttaaaaggtgcctccttcctcggggtggaggcaaacccaaaccagggcacatggcttggcagtcggcgaatgaaacatgtccccacccatcccttcacccatgaccttggactgtgaccaacctgcacaacagaccacagcaggctggattaaggatgtgctagggagagacaaccaatatactctgggtgtgatggcaaagtgaagccctgctttggatcttgaaggataaatgggaattagctcagtcaagaaaaaggaaagagcatccctagaagaaggaacagaaaaaagcttggaggtctttaaaaacatggaacatttggagagctataaaggctgagaagccaggtgcctttcttcattaagtaacttccttgatgccttgaatacagcattttgttggggaaacgtttattgctgatgaaatacaccagtgaaaagattcctgacttctttcttgctttgactactgggctgttctttccccgtcatgaagtagaggatgaatgtaaattatactcatccccatatctttgaggaatgagttaaaaatgtcctttggattcctgtttcctatcagtggcatgaaagatttcccttaagcatcatcacattggctctgcttcctccagtttctgcaaagctaaggatgtcaaggatttggggtatggtcagacaggatcgaaggtcaactaccctgctgtccttctctttaaggaatgcattgctgctgaaaattttgtcccttagtacctctgggatggcaaatgtcctggcaaaagggagtaataaagaggggttgttatattttagacacttttgaatagagtggtaaattgttattcaaatctcatttgatggccagtgtgcacattattcttcccatgctccagttttttcagaaaatatgtgcgtcctctcccccactacttctcctaatgagcacaattcccatatctgggcagggtggacttctctgcaaagaaatttctgtctctctgacctccctggctttccttccggacaaaaaacagaaaactagtggaacagtctcagcagtgtcatttcatgttctttatgcgtactttgtctgaaatcagcaaatgaagccctcttagcttcaggaatataatcctaatctaaacaagcttgtataaatagcacaaggggtctttttttttttaatagaatcagccctatttggaaaactcttggtaaatattaaaatatcataagtagttattgtggcaggcaaaaactaaatacaataaagataaaagtgaaacttcctgttataccagtaatctgttacagaaagtgttaaatatagatgctacagtactgtgcttctcttattagaatccccattttacaaagaagtcaggaaacttgcccaggtttactcagtaaaaacaaatttaagaagtagatgccccaaatctcaatggttggccttattttctaaagaagaggtgagctaactcagattctacatgtaaatgttttgggctagaatttggctctaagcctttttgatatcctgattttttttctgacacaacagacacagtgacatacctctcgggagaacaaagaaagacataagatagttggtgtgttgtttagattcaaatcttgagaagtggagtgaaacaatttctgtgcaagctaaactagagcaagaaaaaagtatatttagataattttatttgaatttttaaattaaacataaaaagtaaaatcataaaaatattttaagtataggtgaatatatttttgcaataaataaagtccttataggcatgcaaggaaaggcagaaaccataaataaaagattactagattggatattttaaagaggatatttatagtagaattatttttaataaccaaaaaggtagaaattacataaagggctatgattatcaataagtggtagagctagtttacatatacaagaaacaaactaaacaaaatttaaaagaaaaactggggagacaagcaacatatgattaactatacagaagtcttataaattagtaagtagtaaaggactaataccacaatacaaaagtgagcaaagattatgaacaggcgattaacaaaagaggaaatacaaaagtcaagaaacttagacaacaaaaacaaaattttttaaaaatgcagacaaaacaacatcataaatgaacaaagaaatgtcaattttaaagggacacctttttagccagttaaattatcaggatttatttttcatgataaagttctgcattgggacaggtgtacactaatctaggaattataaattggtaaacactttttacaggacacgatgatatctattcaatgctttttaaaagttaaactttcaagaatgtacttccaaaaaaaaaaaaaaaaacacaaatgccaaaagaaatctatgtaacaaggatatttatagtagaattacttttaataaccaaaaaagtaattatgacataaagggctatgattatcaataagtggtagagttaatgtaaattttaattctccattaaaacatttaaaatttttttctacatgtcctacagtgaatatatagtattttcagtatttaaatcataatgtatccttcttaagaaagatattggagtgctttcacagtgccatgtcaacgaggggcaggctagggagtggtcggcccagtaatttattttatcactgacattactaagaattgtcaggacagagtaataatcaaaagcaagccagcttttagtggggcttttttattgtttttaggccattgcctgcacactcccacagcattccccattcttgaaacttgactatagctactgacgctcctggaaagaaggaggaacagaagacatctcagctgaagcatggagtatatataaaaatcacttgaaactgagacttgatacaatgtctacaataaaatacagaatcacttcacgactacagacacggaagtgttttttccagcttacccacatgatcctgctttaagtgtagcatggcatcattttcactttgtaggcgtttattttacacacatgtgtgggatacccacaggagcctcgtttctcattattatataggaacttcacaagcggaagtgttgttggctgactgagaggtataactctgtgtttctctcccagaggagccgtgaatgagataccatgtaatatgaatggagacccccttaggcaccctataaatttattataaagcactggattttgaaataacaaaaataacatatgaaatttgaggaaagtataaaaattagaaatttacgtctcttcagagttaccctagaccacggattctactgagtaaccggcctgattgtgtgaacccaagagcaggccttattttatgtagagcaagcaggcagaattactgcaatgtgtgagtggctctgaagtttccagtgtttggaaaaaaaaaaaaaagtagacttgaaggaaatagcaaatgtagatgactctgcaggttaaagcaagaagaatagatggttcaatgaggttttgttcacttttaacatccactttgtaaaggatccttaaaaaggttgtgtttagggttttggctgtacttggaagatggaagaagggaggcttcacttgagcggcagtgtggtagacaaagcatctaacctaggcttgtggcttttgaaaaaacagtttgttggggtacatgtagctctttgctctagatgtttattccaatgggcttggcatttggttatcttttaaggaagtcataagcagaggtaacatttgtaatgtgaaattacttgaaattctataaaaagcaatccatagcaattggcgttgcttttagttcatgaaagcttaaaaatctctcgccctgtgtattgtggcagccagtcaaaagtgagagcagaacataaacctcgttcagaaaccaggcccgcatttttgctccatttgcaaatcctttacaatcccagaaaacagttgccctctttctgttgcccaccctaaatgcaggtgatatttacctattatatcagtttaatgagcaggccatctcacactcattaagtcgatttgaaaaatgatcagaagaatcaggactgtgtcctccgagaatataaatgcctctaaggctatatccattttaggaaaaccaggtcttttacctttgctctggcctcacctcagcgttttcttctacagcagaaataatgcatttagtcatttcagaacactggtttaatgcattaataactgcaggtgcttttcctagaattttggctccgcaagtgtttcacggtgagtgggtcaaaggcagcaagcaagggtcatataaagtgagtattttatgaagccaggatacattgcagtgtgtaagcagaagcacccaatataattaaagtaaatgaggaatatgagccatgtagactgtcaaaggcgtatgtggtgatgtggtggtgcggtgggctgggagaaaaggagggtagagtggaaaggctttaaaactataggaaatcagagaaaatgctggccttctgttccttagcttctggaattagggagttgttatataatccaagccagcagctagaggggatttggctaatagttaacttaatttttctggaatgtcttttttttttctgtaaatcagcctaagtggaaagaaagtgggactctcgtcaatgaatcaaatggcaggaggggccagctgggaggaccgattccccctggatcctatacatattttactcggctccgtggctgtacttggagtgcaggttaaatgaattgttcccattagcgagctgataggacagctcctttagatgaaggagactctgaactttgaatgtcaccgtgaggaaaagaaagtgctcatagaaaagttgacagtgccacttgtggcaggattttactgtcattgtgaaaactatataaaatgatgacttacagtaaggctcagagtttcagcataatatataataataataagacttctgtcagcttataagtgatgtaggagttctttgaagcgccggtggtttatctgtggcttggtggtcgcgggaacagtgctttgtgccattacttgccggctgaggctgattcattctgcgactgatgctcctgactgagtcctcttcactctgattagtcacttttgccttcatttgctggaactaaaatcctgaaagtttacttgcttcctccgtgtactttctcgagccatatttaaagcacccttcagtaagccacaggaagcatagctgtggggacgtgggggcgcgaggcaggaatcatgaaaaatgagaatgttgcgctggctgaaaagtgcctggtgtctgagatcaaagctgtctgaccttcgtccgtattggcatcagggtgatgacttgttttctttgttctgttaccttggaaactgaggcacgggttttatgtacgtaaataaagagtaacaggatccgttctcttcatcatatagcaattgtaagaattatttggaatatttagatcctgtaacaggatctggtgaaatgcaagtgaaaaaaaaaaatcaagatgtttgtagaaggaaatgtataagccaagaagaggtccctggcatgtacatactcggatggatattggcaccctcaaaaaaaagtcaacagggtctcaagtgacaaagacgaaaagagaacatgctaagggttgggctaagttagtgtagcctgaattttttcagtgtccctaaaatactttttgctccttaaagttgtggatatgaagagcagtgttgggagaagagatggcttctaggaacgtgggtggggctgatgcaacatgtatgggcagagtggaatttgggtcactaagcagaggctttggctggtactagaatacatacataggcctttcctcctaagcaccatgggcacagggatcattactatcttgtctgccgttgtttccctgtcacctaacatagtgcctgactaacgtggggcagagcaagaacaattatgcagtcaaccgggggtagatggcaagcctgagatttcatagacaaataaatcccactttgcgctgaaagatcaaattgttcatacgttgtccattaatgaggtattcaaataatttcaagcttctttctggccctgtagacctgaatttaaagagattctgggaccaattagtgacagctctgaaattagaggtaactaaagtgacctcgctgcatatgggttgatttaccaatttgtaaaggccttgagagtgctggttttacattatgtggggaaaagcaaagacaagggaacacttggctgtgtgtggcaggattgatccacatgcatttggataatacaataacataagggtccagtctgtcaccctggcagtgaggagtgtcctcgaggtttgggcgaggcccctccagtcctggttatatctcttgctcacaaatacaaggtgggtagaacggaggggcagttatgtgcacaacaatacaccatcgaaactctcatttgtcaaatccaaactgtacgaaatgagaagggacaaccagaatgtaaagctaggagagcctattggtgaaagagttaacgctgcaaggcatggagaccacagggagctcttgagccagaattcagatgctcatcttccgtgctttttgccgggtacctttgacttttgatgtgggcatgggaggagcatttaaatcactgggccagtgtcaggaggaggaggaaataagtttaatggccactgaaacaaaaacctttgactgagctctggcccagctctgccttacagggaccatttgaccttaaacatgcccctccacctttctgacactcaatttcctcactgcaaaatggatccaacagtatcttcactacttacttcacagagggagatgaggaaatcagaaagtagattgaaaacatgctgccaactgttttggttactgtagccttgtagtataatttgaagtcaagcagcgtgatgcctcctgctttgttcttttttgcttaggatggtcttggctatacgggctcctattaggttccatatgaattttaaagtagttttttctaattctgtgaaaaaaaaatcaatgatagtttaatgggaatagcattcaatctataaattactttgggtagtatggccattttcatgatattgattcttcctatccatgaggatggaatgtttctccatttgtttgtgtcctctcttatttccttgggcagtggtttgtagttctccttgaagaggcccttcactccccttcttagatgtattcctaggtattttattctctttgtagcacttctgcatgggagttcattcatgatttggctctctgcttgtctactgttggtgaataggaatgtttgtgatttttgcatattgattttgtatcctgagactgctgaggttgcttatcagcttaagaagcttttgggctaacacagtggggttttctagatataggatcatgtcatctgcaaacagtttgacttcctctcttcctatttgaaagaatatttctttctttctcttgcctgactgccttggccagaatttccaatactatgttgaataggagtggtgagagagggcatccttgtcttgtgccagttttcaaggggaatgcttccagcttttgcccattcagcatgatattgtctgtgggtttgtcataaatggctcttattattttgaggtatgtcccatgaacacctagttaattgagagtttttaacctgaagggatgttgacttttattgaaggccttttctgcatctgctgagataatcatgtggttttgtctttagttctgtttatgtgatgaattacatttattgatttgcacatgttgaaccagccttgcatcccggggatgaagccaatttgatcatggtggatttgttttttgatgtgctgctggattcagtttgctggtattttattgaggatttttgcatcaatgttcatcagggatattggcctgaagttttctttttttgttgtatttttgccaggtttcggtatcaggatgatgctggcctcatagaatgtgttagggaggagtccctctttttcaattgtttaaaatagtttcagaagaaatagtaccagctcctctttgtagctctggtagaattcagctgtaaatccatctggtcctgggctttcttttggttgggatcagtcacacagttttagagagattgaacctctttttaaagttttccagccagcccttactggcttgaattttttattatgaaaatttcaaacatgaatgcaaagaggggcaacagtggaatgaactgccctatacccaacacccagattcagccttaccaacattttgtcacacttgctttatctatccctgtttccctttgctaaagcattttaaagcaaatcccagacatcatatcatttcatctttacatattttagcatgcatcctgctcaaaagtaaatgcccagtgctctcacattctcccttgtttcctttacaaggctgcttagaaatgttttgtgattgctattgtgttctgttttctggacctgctatgtagcgtgaactcatttttcctttctgtactaccccacagacctgccatgtggtccaaaagagtattagtcaagaaatgatgctgcattgttttatttaggaagaatgacccaaaattcacagattaagtaataataataataaactaaatatttacaattgggattatgcaaatataaaacagagctatctttaaaaataaagtgtatttttttaaaaatctggcaaaaacagttttgccaaactactattccaactgatcccagcttaattcaatgggaatggcatgctgactttttattataaaatcactttgaataggagagaaattgttaaactcaagttaacctctaagctgttgtatctaagaactatgcatattgaaatcactgtttccaaaatagttttctcaatctcagaaatgagagagttatcctgaattgccatgtaggagaagccagccacacaagcctggcttcttgctgtatgtagcatatggttaactaaaaagttttctgcagattctttattatcccagagccaatatgagattagttttacaagttgggttataacctttacagcttctgggttggggatctgctaacaagatcataaagatctttctaacagatgaggcatgcatgccctgtgttcagctctggtaatgaccaaatcaattttatcacaagtgtttaacagtgccattttaacttttctattgattgcctgacctttgctttgggtcctggggttagcgtgtgttctctcccctctcactctttgtatgtagccttccagtttctcttcagctgtgcaaacctctctttagatgtccccgaccttctcagttagcacttgtctcaccctctatgctcctcttgtcttctctacacacttccaggagctttggagtcactattggtaaactagatgtgtggctttggggagtcaacttcattcacttaacaagtttttctgatcctcagttaacaattttttgtgagtatctatatgccaggcaccattctaggcatcacaaatacagtggtataccaaggatgggaagtccctgcttcaagaattgaaattgttgggaagacatacaactgtatcatagaatgtcaggaggagggaactattgtgaagatacaaagtaaagcaaaatggagaggggggcagggagagcgaatgtggataagccggctgggaagcattctagcaggagatgagagctgagcaaagatctgaatggatgtgaaggagacctgcggagaagtggagggaaagtgatacaggcagagggaactacaaacagaaaggatgtgagtctggagcaagcttagagctttagagaaaatttaagatggctagtgtggaagaatgagatgggtgagacagagagagagggagacactaggtcggagaaccaggcaggccggatcatgtaggaccctcttaactgtggaaggagtttgagcaggggactgatgtgatcggatttatagttcaaaaagtcactctggcttacatggagcttctaagtaaggctagtgaaattgttcctgggtccagttgaggtgtcctgtatggtaacaggaagacttcaacgcgtccaggcctcagagcccacagagccactcctgtgtagggtgctactttttgctctgctcctaattggctggctgacttgaaaacagttgcctaatccctctgagtcccagtttgctgtcctttttcagggaaaggtacaatttctttagtctattccagatctaacatttggggattttaatctataaactagttatttcctaaccctgtgtttttgttagggtaaaggttgaaaactattgtagcaaagagactcaagaacacagtgacttatatgaggtagaagctggcttctctctcctgtggtattgaagccagtggaggctgccaaggaagctctgctcacaggtcctgtctgggtgctctctcctgtctccaaaggtggccttgcccacatggctggagctgggtcatggccttatgcaagttccagtccatgggaagagagagagaaaggatatccagagtgaacagcttccttttaagtgacatggaagttacacacacccctcctggtcacatgtcttggtaagaatctagtcttttggccatacccagctgcaagggactctgggaattacagcctctaactggatggctatgtgtccatctaaaacttgactgccctggaggaatgggagaatggatttggtggggcagcaagaaaacaactgcactctgtttttggaggaccccagagtattattgccagacaccttacactcataacatttcctggacctttgtagtaatttcatggaactgtggtaacaaagtgccacaaactgggtggcttaaaacaacagaaattgttttacgccaattgtcgttggcacaggcaaacacctgtgtggtagctaaaggatggtggtgttctctcacagttctggatgctagaagtcccaaaatcaaggtggcagcagagccttgctccctctgaaggctttagggaagaagttcctgaagcctctctcctagcttctggtagttgctagaaatccttggcattcttgagcttatagctatgtcactccaatccctcctccatctgcatgtggcctttttctctatgtgttgtctgtgtccctgaatgcacatctccctctccttcctcttacacagatagtagtaattaaatttagactaaatctaaatacttagtctaagtattcagatgactggtccctggaccagtattgcctcatcttaattatatctataaagatatgatttccaaatgaggtcacattcgcaggtatcaggagttaggacttgaatatgtctttctgggggatgcaactcaacccgttacaacctttttaaaactaaaatttaaaaaaagacaaatggaaaaagaataatttaaaagagaagaactgtgctagttgaaatcaatcaaaatataacaaggtatgtcaatctccaaaagaacccatagtttattctgaagctcggggccaccttagtgtctcatcccaaggacatatgggccttttttccttcctttctctatggaacattccaatgcattcctgtaagatgcattgccatcagataacattgcttagataatagaattcactgacagctgaccactttcagctttgcactgcctataccttttgataatcacaacagcctcatgaaaaaggtatccttacttccatcctacagatattgaaactgaggctcaagctaagtagcttgcctcaagtgaaacgactagttggtaggtgaaactgggcttgcaacctgggtctttctgactccagaggtcatcctctttgtattacagggcactaactcctggagatttatcaggaggtcctgatgaaagggctcactcctgccttgaggattttgtgatcagtctctgaggtagcacctgtactgcagaggtctccacaggcctttggttgctggtatgtgttgacactgtagtcatatgccctatagtcattggcttaggcaaacacctgtgtggtagctaaagggtggtggttttcctaggagtcaaaagttgtcccaagtcagcccctgggtctctcactgcattctcgagcactgtgtaaaatacatggtactaagcaagccttatttttcagacctttatcagcatattggttatgattaccattttggcaagtattatcagattatccatcaccatagggcactcctgaaagtagccagctatgctatcacactttcacttcagacttcacatagggttctctagaaaggataatgcaattagtacttgccataggaaactgggtctcctaacagtcacagagagatgtttgcaatattaaaaactaatattaggtcaacattgccttgctttatttcattttatcttcacagtaaccttgtggaatagttatttaatattaacttttctttcttattattataattttatttgtacaggtgttttatagaaattttagaaaacatagacaaagaaaaatcagtcataattcctccacccaaacataatcactctcattaatttggtgtatgtattttttgtcttttttctatacatttttttttccttttttgacaaaatgatatactatgctttgggactttgaatttttttgtttctcataatgcagctggaacatcattgtctctgatttatttttctttattttaatgatggtagcgccttccatttggtaaacatatcatgctttatttgccatcctctactgctaatatttgggtgttcccttgaatgttttgctgatataaataatattatgataactcttgtgtatattcatgattaattcctaaaatttctagtggtggaattttagaatgaaagaagaaatctttttcctctccttttagtgatgaggaaactgaggatcggagagagtatcttgccccaaattatatagctggtaagtggcagagctgggaaaagaatccagatttcctgattctaaaatcccatatgggaacatagcttgtacatctaatctaacaataccaaacttttcttcataaaatctgtgaatgcaaggtaagtattttgttgttgttgttttggagacggagtctcattctgtcacacaggctggagttcagtggcacaatctctgctcactgcaacctctacttcctgggttcaagtgattcttgtgcctcagcctcctgagcagctgggacttcaggcatgcgccaccatggctagctaatgtttttggtattttttggcagagatggggtttcaccatgttggccaggctggtctcaaactcctgacctcaagtgatctgcccgcctcggcctcccaagagaagtatcttgatggctactttcttttcttgagcttttatccagcaatcaccaatccagacaaactgcctaaagttctgtaatcagaggggagtagagaggctacaaatagtaatgatctatgatttcctaatttataatttaatcagtttttcatatgtcttcttcaaagtgttaataatattgatactctaaaaaattctttatggacccatggtattctatatatcaggaaataactggtcaccacctctctacttttaaatatttgtttaataccccattggatcctagggcttttacttttcatcttatctgagagtgggcctcatttcctccaaatttagaactgaatttctattgtgtccactttggcagattccctctcttctctaggtgattcaagacatgagtgaatgcatggggtttttccttcttccatcattacatagtgatacccttggtctatctatgcttctgccatcagtagcagacttcgttctggggggagctgcagaccaggtgatatttcttcagtctttacttgccttgacttggtatgctgaccaggatccatgctcgatgaggtatgatttaggttgtctatccaagggcatgattcatgcaaacttcccatagtgtctgacttgctttggggccagcaactccataatctttgggccatcctcatccaacctgttctggtagcttcgactttgggggctgcagctatagccggcatccaggcaagtcacccacagacagttcacttccgtacctgcccatatgagtgacaaagataaacagatttaacagattgcagaggcacataaagtaaagcatttctggaaaagcatggtgtaagctgctgatgtttacctgagctgaattattcacttagaagataaaactgctcaattctagaaggctaagctgaaagtgttgatatcagttcacacctctgccctcagagctccaagatcaaatttaaatcaaccaggtaatatcgaatggatagcatcatcttccatacagacactcaataaaaggaaatcaatttgaaaaaataaggcttcttatgattcttactatacataagtactaatcatactttgggacgagtaaataacaagagaaattgccctccttacatatggacttttcgtagtgcattgaatagtaatctctgagaagagggatgtttcccaaataagttttgtctgaagatttctttctctgatagactgatggtctctttatgttgcctttgctggggaacccggaatgaggctttgtccttggaactgttttgttaaagataaaggcaggacttgaaagagggcatacttctggtctgcctgtccaaaattaaaagatatttctgggcactaatgtcaggaaatatgacctagagatggagagcaatcacaaattttttttttgaattcaaaaaacaggaaaaattcctcttatccattcccataaccatttttcaaactaaaatggaatatttttcatggcgtccaaagcaccttggttggtaaaagagctgaaatattattgccgaaacagctcaacctaggctcaaatcgaacataaaagaaacctcccattatagtattattaatgttcataattagtatatctaaatgatttttaaaggctttttatgcaattacaaaatgtttgattgtcgtaacattgctaatgctttgatgccttccacgtgttgtccttggtccctgcaaccctggcacataatttatttctcttttgagtgaactctaagcattagtgtccattaagaatttttgaaacaaagtccaaagattacttggagcactttcagtaatatgtactgattatcattaatagttcttttgtcctagacaaggacattgttttgtaacatcattttgtttggcgaggccctactcgggctgtgttccggatccgcctcgtgcatagattttctttttgactatgtgtagaatggagcagtctcctgggacaactcaggattgaggaggagggggacataaggccagcacaaagtgatattttttctttagaaaacaattattagctattcaaaaaagaagcctaaattctaggcctcgtttcttagctagtgttcatgcactgcgtgtaaatttgccgttttaactgctagcgcctcacaatgaggaagtcaaaaagaagtaaggagagcacagcggatccaggagaccacagcctttgcagcatgcttgttgagaatgtggcagggagtgggttaagtgtttgggttttatttggaaaattctttccttagctctccaatgctgccttcccggattatcccgtttaataacaggattaatgggttttgcctatgtccagtcaagggttgtctctctgtttgtctaatataaagtggattcacaaggtgtatgcaataagaaacatactttagtaggaaagaggtactatatcctgtgccccacgtgaattatcttacattttactataaacctagtcctaagaattttattcccattttatggaataagaaaagaaaggctcagagaagttaagctatatttgcccaagcgctcatagcttaaataataggtgtcttctttaactcagacatcttgcagggagggagaataaatcttgtgaaagccttcagatttggagccctgcttttctaggaattaaaggaggagtcaatgtgcaagcctggtgtagagacatgagttgggccaattcaagactttgttcattatcactcaacacatctcttcctccctgccacattcacttgcaaagtaaaaatattgacatatttttaaaataaaaggaaatctacatggcatggttttgagtggtttgtttgtttgtttgagatggagtctcgcactgtcgcccaggctggagtgcagtggcgtgatctcaactcactgcaacctccacctcccaggttcaagtgattctcctgcctcagtctcccgagtagctgggattacaggcacccaccaccacacttggctaattttttgtatttttagtagagactgtgggtttcactatgttggccaggctggtctcaaatgcctgacgtcatgatccacccatctcggcctcccaaagttctgggattacaggcgtgagccaccatgaccagcctgttcgttttttaatgctaacacagaattttttcatgtttataatatctctatctcaaaagttgttttctcgttgcaaaagaggacaaaagaagacacacaggctgaatactggcaaagtggcagagtggcatcaagtctagggccttgtccaggatacaaggcctctggaaatgctggtttggtaattgcaaaatttgggaagaggaaaaatgccacctcttactaaaaaaaaaagaaaaaaaagtaaaattaactggatacccagacaatttcctaaaaaccaagagacaattagaagtcagtcaagaaagttaactggtccaagatttggcactgacgggaaataccagcttacattcctgaagtgctctgttctgggatgactataatgaaacttccctactgataaccatggcagggctaaatctgtgatattttcatgacatttcctttgctttactttgaagcatggccagttaaagagagtcaagcatttttgctgtattagaagctcaactttgctttggaccgaatattttggggccttttagccctcttagttttaggggtttaattggcaatttaaaacttctgtcatattgttaagttagaaattgtgctcaagcattacctggaaatctggaaatacacctgccgtgtgtgtgtgtgtgtgtgtgtgtgtgtatgtgtatctgggtaaaatagaaggagtcttacagctttatcaaaaggtgccatttttctctagcccagataatttttaaagatctcccaagaaaagtgcatcttttacttatataaccttttgtgggcactgtcttttttcttctttggttgttaaaggcaagaagaaaaaagtttcagggggttacctttgattatgagccacattggatttcttacagtgagaaatagatctgacagcctgttgcttggaaagatgtggtttggcttgatagcttagaagcagggcaaggagccattggttgatgaactggaagggaaattaagaaatcatgttggctgggcaaggtggcttacgcctttaatccagcactttgagaggctgatgcaggaggattgcttgaggccaggcattcaagatcagcctgaacaacatggcaagacccccatctctacaaaaaaagtaaaaattctctgggcatggtgccacatgcctgtagttccagctactagggaggctgaggtgagaggatggcttgagcctgggaggtcaaggctgcagcgagctatgatggtgccgctgcactccagttcaggcaacacactgagaacctgtctggaagaaaaaaaatgtcactgactacctcattctgcatataagaaaactaagacccagagaagctaaattatttgcccaagtcatccaccgtgttcactttgggcgcagggtgtatgtgtattttaggtttagaaacttggttccaccccgtcattcaccacaattctatcaagtccctatctctgtagagagcattaccctgctcgtggtctgtttgtgaatctctggggaaggatcttggtgttcttcccagtcatttggaagtgaatcaaaacctgcacaacagctggacttggttcgatgcccttcggtagtggggaccaaagtccttgcctgtgctgatcagcagcccacttggataatgcagccacttgctagtgagtaggcagcttccttttgtttatttttttaaatttaagactgggtgtcactgtgttgcccaggctggacttgaactcttgggctcaagctatcctcctgcctcagtcacccgagtagctgggattacgggtacccaccaccataccaggctctttctctagactttagagagtaaagcgaatggagcttgggatctagaatagagtacacttactttaaggaacttggttctccgtctcatgctgtcttccatcaaatatgaggatattttctagtcagagtacttggtctgaaaaccagagtcctaggccatgagtcagtatgaaactgagggacatcatgagtagcaatggcatagctttcactatcacatggtaattcagtttggttaaactaatactatgtgagttgctcaccccttaccaaagtcatttgtgtcacacttcccaatttgtaaagctcttcatacatccttatttcctttaattttcacaacagtcttttaagtgtcatcatgattgtatacaattttaaaaaccaagaaattcaggactagaaaagttaagtaacttgttcaaggtctctcaacctagaagcaggaaaatgggctatacacgcaagctcaggtcagcttgactccagatctagttaccttaagagctgcctttattcttggattcctcattagaatcagaattatttgcttccttgagacttattgtagtttatctttagtaagcctaattctcccaaaaatctcgattcagagctactgctggtggtagcactaggtttgcatacgattttttttctgaaggcctttctccttccacttgaggaaaaacactggcaatgtatgactgctatgagctcactgaggctgacctctcctcctggtgagaaaaacaggaatcttgtaacctctaggaaaatgagaaaaagaaaaggggagacccatccctcatttaagggtgagaaaatggctgctggtaacaaacccaggcacacatgcctgctgcgaatgaaggcctaaggtgggcaagtgtgggtaattcggtcagctggattcctggcagaatactatgttctagaatattccggaacattctagattcaattcaatatgctcttctagtagtagggactgtggtttctgtgtgtttgcatcagcatctgagtacatctttcacccaaactcaggatgagtcttcctggtttaaatatggctgagggcactcccataggtttaaattatttacagagctgactgctgagtggtatgctccaaggagtaaaacttttttgagtatttactcttttgagggtacatctacactagtgtttttaaagatttgccatgagtgtacttccagtttaatataactttccacagagaaatgtcttattatgccaattaaactttcctgagcctcagtttccccatctgtgaaatgaaaaggatgttttctgctttttttggtacttctatggaatcatttactatgaagtactagagcttctatggagaaattaggtttcagaggatcaaagagaattccaatacattttctgatttttttcattaaatttgccttttgtgtgtttgtattgtttttgtttgttcactttctctagggaaatagacttctgtcttcagaatggctaggttaaaaaaaattaaatatcatgcacagtcgtatctccataattaagcagttgtaatgcaattttaacaaatattgctcttgtgtcaggagtgtgtcttctaagcttttctccataaaaatgtgtttattaattgattggtatatcttcattggctataataaatataatttacattcttcttgtataggttaaggctgccatataaaatacagaatgcacagttaaatttgaatgtaagataaactacaaattagtatcagaaattcaaatttcactgggtagcctgtattttatctactaaatctggcaactccaatataagtgtagctcccagttatttatattgattattaattgacagttaaacaaaactgagggaccgagagattgtgttgttgccaaagtcatgcttcctcctggagacagataatgaaaagttttagctccatgccagctactgcgacctccgagatcaagcagctttcttgggaagattttcaaaatctattatcaatgtaatcgtcatgaaaatatttgatgagaacactgcatcacgctgtataataaatttaagtagaaaagtcaaagcagtggtattttcatcaggcctttggatgtcaagagaaaatagttccacactcagcgaatatagataggtcgttttgggctgtattaaatccaattgtgtggaggttttgaataatcaggagagacagcctaagcactttctcttcaaagtgattttacagaaagcactatttcctaaggaaaatacacatatatctctcataatgctgaaagtgcactaatgtatcaatttattggtgctggtgtcatgagctggagttgcaaattgtattcagattttaaactttactccctgctgctgctgggggaagttcccttcccacgataaaggttatttcaaaaaattctagaacacttttgtagttttcatgtgagacagtcttcaaggatttttttagaaggttctaacttcactttgtgaagccaactcaaacatgatttaaaacaaacaaacaaacaaacaaacaaacaaaacaatagttttcctcaataaaagttgcggggtcggggagaagaatttgagttgggctatgtaatttcaacttccctaaataagtcctttggaaagtgttggggggagcaagtgtgtgattttggtcttggctcacaacttcggaaccaactttttaaaaaatgtctgccgtggattttcacaacagatttcttccccgtacgacatgttccctagctaagtaataggtctgatgtggctgccaaatttttcaacaacttttactttccaaaggagggttaaatagttcccttaataacttgaaagaaaaaaaaatttcaaggtttaccacagttcttagtcacaggctaaatgttttcaacagttttatgactttgagcctacttagtctcaagaacgtctcccaagaagaatgcagcataaaggattcaaaatgtagtaattctgaaatggagatagtgttgtttgcatcaaagcatacatttatgctatctttatcaggacttctgtgccaaatgttgcttagttctatttgtcacctgctacctataaatcatcctgaaatatcaagggtgctgactcatgaatcgctcgtgttttcgtagtttgtgttcatacatttcattcagttgtgtttcaactgtatgaaacatttgggggccatttttagagaagtagcagtgattccctttctgaccttaatgagtacagacacataggtacatttggtggatgtatttccccctcaccattaaaagttgtgcttcatgggaggaggaagggtcgttttcattaaagagtaaacacagaaccaatggccatagcaaattaattgccgtgttgctcatcttaccctggtctgagtaggctggcattgctctcttgtgccttacatctttcccactctgcctataaacatgattgtctcccctacttaaaataaaaaataagagtctcctcgcgtcctgtttaaccctgtttagttattgtccatgctccccacttttaccacagaacctcttaaaccaggaggtgatggtcgctgcctcatcagtcacggttgcatgcctttggggtaggtctagtgacactcctgtgcaatgttaaaactggtcttgcttccacttccccatctgaactaaacgccttcctgagcacactgggaatgacggacattcaaagcagcacacacagggcactttctaacctatgttattgtttcttctcttccaggtatctcagtaacgaagaagacacatacatgtaagtaatgcattttttttctgtccaaagttttctgaagagttggaattcgcatatgtctggctgctgtgacccttcaagtatatactaatgtttcagctgtgatccatggtcaacagaggtcattttttttcaatctgtagtggtcggaagtggcacatctccacctgtttgtactgagtgtgtgttgaagagagaggctagagacatattctgatgaattccagtgtttccagccatgaagctttagaaaaatcatgaaatctagccaggaggatcaattacttactgatcacccttatcctagatccttcttagaagagctggtatgtttctaggaaacatcaccttgatttcttttaagctttggtctccttttcctcaccactagttcacaaattaggccgtttcgtactcatgtctgtggagcagagatgctgactgggaatagaggcgctgtcgctcgaccacgggcatggcctgcgagggccctgataaatggcatcggtagtttgatgtggaaacgtgtgctggatttatgctctgtattcatcccacttctcaggttcaactgctttcatcaattgccttcatttgaactacaccataagttacaaactcacgtcaatgtaaggtgttgtgatttgcaatctgagcaatgatgtttgactgtgccttgaacctcaggatgaaacaagacatcattgatgcaggcagtcaactttcactgtaattgaccagcatattatttaggctttgaattaatggtgtcattagaatttgatgactattttagaccacggatacgtgctacctatgagatatgtttgggcattcttctaaggcaagcagtggagatatttatggcacaatacagggacaacaaggatgtatcccccaatttttcctaattacactttaaatttttttatttcatgtgaaacgtttgggggaaaacatctgtattacatcaaagtagtttatcttgtgcctcagttgattcttgaaatctgctcttgggtttgtctgtctgtctatctgtatttgtagaaaacaaaaatgaaaaaaaaaaaaaagaaaaaaccaaaaaacgtcaaattggatgagaagttgcctgactctgagggccctgtcctgcagtctctccacgtggctctctcatggccttcaatggaatgtttgcttgaggaacaatgaaaaggtcaggcccgtactagacacatgatccggatggcacctccatctctcaatgcacagttccagttggctgtccctccatcagggtagtctgtgacccttagctttttgggggttgttttgtcgttgttgttgttcttgttcttgctgttgtcggtgcataattgagctcatgatgactgagagattgacagtgcaggagactgaagtcctctgtatatccgcagggcaggcatggtacagagcgcttccttgcacagccttgcccatgagctcgtccctggcccggagggacccactctagaggtggtaagtaattcagtctttctgctagctcagtcctgggcctctccccaacaggggctgatgattgtgcctactgtttatggtggtttggggtatggactcctggccacctggcaatgtacagaaagctactgactgtttgcattatgacttggctcttagataagtgaacaaaaccactacttcagctccactggacatgaagagtacatcccaactaataagataacatagacagaaatctagatgttacctagtatacagacagtccatataaagagagacattcgaggaactgtcatccctgagaataattttcttgggctattgcagaaacaataacctgtggttgagtttaaattcatggagggacttagatgacagcatgagagtggtggctagagaggaaaaattggtgttctaaaaacagacacttgaaccaggtgggtctttccacaaaggcttaaagaatttcatcagctatactggctttaatgcaaaatcaagatatagccacacagggtggactttgagtgcctttctaactgtgaaaatcagcaagaaaattcttaggcattaagcttgaagtcaatgtagaaagacttaaagctccttttatataatggacagaaagatttggatcagaaatgatattgttttggttgatgtttactttcatgattgggggagagggcccagaataaaaaatggccgaatgacaaaattggaaagaatagcacctgaaaacacagttgacacaaaactttacatatgccaaggagaaattgaattgtccaagttacatgttagtggaagtcctccatgccacttgaacatggagattgtttttgtcacccagctcagcagacagcccatcgtatttctgatcttagcatctccacagggcccacagcttgtgaggagaaagacaatcagtcagttttttctctaataacagtcacccaaattacttcttctttagcatttgttggatttttcttgaaaactgaactgtcctaacttgcctatacgtttttttttaagatgttaaattccagctcctcttaaatcatcttgacatctgttcttcaaaaagtttcactatcagtgaagtgtatgaattcatttttgtaccgtctcaaaacttccatttttagccagggttctggaaaccttagtcaagacttgactacataatcatcgacagctgaagtcacccgacattagcaatttcaatcttggtttcctaactgccctcacggagagattgttcaacttacaaattaatatgtacagctgcagaatatattatcagaccagagtgtcagctcacaggtacacaagacagaggtgcacatactgcaaaatgagcctgaatagttgtgacaccagatagtattttagtccaccttgttatctggaaagcacaggtattgtttcttttaaaaaaaataaatgttttgggtgacttgaggcagaaattcccatgaagggaaatttgactgttaagcttcagaggagcccatggacatagtctttggagaactcagtttctcctaagcttctgagaagggtaccttaagtgtttgttttctgtttagttggccagtgggagaagacaagctttggaatttctagtgtttctcgtgcccaaattgttcaaggaattcttatatttgtgatgttcttcaattgttgataggaaatgttgctgttggtttttggtgtgcaaacataaaagagagtttttaatattagatcaattttacactgtggtgtggaattgcaatttaattttcctggggattatatagcacatgtatttggttggaccccttcaagattgctttgctttggtgtttcacaagtttgttctggtctctttcctgctgaaatagccaccatgcagataagtatcattttcggaatcagctgctgtgttggtttttattatttgccaaggacaacgagtcattcactcctgaattcttagtctaattcttcttggatagttctgcatttgctacaacgttacaagaggataaatatggaggtgaaaagatgcaacaaatcatcctagctctttccagctactggaaagtttagcatcatggagtcctaacctcagaggacatatatcagacagccaccacaacacagacccaaaagatatctggtaggcccctgaaccgtttccagaggcatcagaccattgctgcttccttctgttctcatccttgtttacagtccttgtacctcttgtcctagcctgccctgcctgctttctcccacactgagggacagatacaggcttctgaaaggtgcaggttactcagtggaagcagtcaggaaaatgtgtcagtttactcccaacttgagttgttaattttccccaataaaaacccaaacaagatacgcctctgaatcttcggaaatattttcagttaacgtgaatagccattaaaaggtaatctagtacattttcaaatgtttgattgtagcaggctaatacctacaatataaaattaaagcactgtgttatttataaaaagatttagttctcaatagtaaaatattttagcacaaatcaaaatatttctttgagaactaatcttttgcatccattttaaaaagtgtttattgcaatcatttaaaatggaataggttaatgtattcacttttcaccccagagacttggctttgaatttgacttagagaaaattagttttgaggcctcaacctcctctccataggcattcattgatatcacaaaatgaacccaacaagttgtcacaattgttgccatttactcaggagatccaaaaactagaataaccttattttctcattttttttcctatccttgaggccatacttttttattgtagactcttagcaaccccaaacttggggctcacccacattgttttcacagtccaggaaaactcaggaaccattcttggcaaagctaatggaaggtgctttggtgatatagttagtaggtttccgtggcaacccatgtgactcacagtgactcacggcagttataatttctgttgctggcagggtgttccattaggacagatgtgagaagaagccacgctgaagttcttttagtaggccttcatccagatcctgtctgcccattgacaaatagtcaggaaaagggataacctagtactcacaaagtaactggaagattcattgcttagcttaccaaggctaccagctatctcagacagcaagcttgttggcagtgggtcatgactaaaatacaggtgctggcctcttaagggctaattaagggacaactattcattgaggacctactctgcgctgataggctttttaccttccaggcgtttacagactagttgtaagtaaagactagagggagacaagataggggatagggtgggatagaagtgcataatcacataaaacaatctgaaaacacaaatgccaggtgtaccagttccataagtcgctcataactggaaaacaaactaagctggaagtatgggagaggaaaagaaaactagagaaaacatcgaggattctcatattgtgatccaagcataaaatagcaataaagcaaaaggcaaaaatttaaccctgggtgctaaaacctatccccgctgctcatctccacccattcttacagagtaacatctatttagtttcttcaaatcagccagtctgagaaagtaaaaatccctctgtactgtctggaagcgtttgccttgtttagagtcagcctgctcagctacagccaagccctcctaagcttaacaggatttctctgtctcatcatattaaaaataaatggattgcacttggccctgccagtcagttcttccaaagtagaagatttgcatagtcttaaagcccacagttcatggcgaggacctgtgaactccatagaaaaactgaatagttacctgagcatttccatcccaacatccagttgattcaagtttgcccagttagtagacttgaggttcatgaattgcatttggacaaaaagtatttgtattcccacttcataacatacgttccaaagggtgtgttgagatggtgattggctctttaaaatccataatcactaccagggagaaaacaaacatgcctagcctacgagggattggtgtggacttgatagacttattacatacttgataaatgcttagttagacatgattagattgattttttaaaaagcgctagatgtctatgacataagtttgcaatatgcttagtttcatattgacagtaataatggcagaagtaatagcagtagtaccattacttgtagtagcagcagcagcaatagcaggaacaccacctaccaagcaatctgaatattcgaagcattgtgtttaatgctttacgtgcattatttcatttaatctgctcatcagctttaggagctttgtactgcttgcacccgcattttaaataagaaaatgtacatgagagacaagtagcttagagaagtgaaaaacctcgttagctcacccagctgggcaaagcctggagtcaaaacagagtagattgcccccttgtgcacacataagagccacaccgttatctccagtatcaacattaactaatacttgtggggcactgagtgctaggcacttctctaagcactttctaagtgttcatttatttatctttactgcaactttgtgaggtaggtgttgctactatccccactttacagatgaaaaccgaggtccagggtcctacaactagctagtatgtggtggagccaggatgtaaaggcaatccccagtttaaatgcttttaaaatgaagagcttcatttttcagagtggttcttccactctaaagtataggaagaaagccaagtgcaacatagtcattcttacaattgaccaaggtttccttttaccttacaactatgctacctccataggcttctaagcttgaagaacaaactgattgtaagaaaggggaatgttattcccactatgtgaaaaaaagtatttaaacaaagtagtctactggaaactgtacagcgttcttactttattattttttttagaaggggactcgctctgttggccaagcgggagtgtagtggcatgcgcgtggctcactgcagcctcaacctcttggtctcaggagatcctcctgcctcagcttcccaagtagctgggacttgctcagctaatttgttttttatttttagttttttgtagagacagggtcttgctggctgggcttggtggctcacccctgtaatcccagcactttgggaggccgaggcaggcagatcacctgaggtcaggagtttgagaccagcctggccaacatggtgaaactccatcgctactaaaaatacaaaaattagtcaggagtggtggcacacgcctgtaatctcagctacttgggaggctgaggcatgagaatcacttgaacccgggaggcagaggttgcagtgagccgagatcacgccactgcactccagcctgggtgatggagtgagagtctgtctcaaaaagaaaaaaaagagagagacagagtcttgctatgttgcccaggctggtctctgaactctttagctcaagagatcctcctgcctcagcctcccaaagtgctgggattacaggcgtgagccactgcgcctagccaaccttcttactttaaatgaccattacttatctttttaacaatttaacttagttcatcaaagaactgatgtctacttaatgtcatacaacacaactgattccataataaaacaattgttcaaagtggttacttctgcttctaggacagctatgtaccccacaccagtaatgacatatatttcgtacagcacaaacccatcttcctctgaaacaaagcctttaacggacattaatgacatttataataaatttatacttttttgttagaccaacttagtaattcatttataactttcattgccacaaagcagtactatgattccggacacagtggtttctttgaaacctatccaaacccaaaaaaaccctggaagctaacagaacgctcaggaaacagatatatatatatatatatatatatatatatcaatgggatatataggagatataagaaaattaacatctagattttgaggatgtttaagcatatctgaacttaggactggatttacacttatatcagcttctctttttattgcaatctgtacgcagaggaataaaaacgtagaagaaacagagatgccaatgtgtttaaaacaagaagagagtgatcactctacattcactttcagtgatgacactaaattttttacactgatttctttatcaattctgtggccaggaagttagtgcatttgtagtcacatggccctttggattataattgacatccacatctatacattataaggatgaagatttttaagctattcaattaaatattttcctttgactgccaaaatcccttgcaatggaatgttctccacccaatccacttccacttctgggaaaacatgtttttctatgtaggagtgatagctctttcccttcttgattttgtatgtctcctaggcatcaactccagctcctactgtcttaaatagttaatagccaaggatactgattagaaggcatattgaggagtggccgggcatggtggctcacgcttgtaatcccagcactttgggaggccgagacgggcggatcactgaaggtcaagagtttgagactagcctggccaacatggtgaaaccccatcttaactaaaaatacaaaaagtagctgagtgtggtactgtgcacctgtaatcccagctactagggaggctgaggcaggataatcgcttgaacctgggatgccgaagcggcagtaagctgagatcacagcactgcaccccaacctgggcaatgtagtgggactccatctcaaaaaaaaaaaaagaaaaaaaaaaaagaggtaggatatactagattaaggtttggattcagtggaaaggccttaatctataaatcttttattttacattttcttcttagaggaaaggggaaggaaattatatgctaggcaatccagacacctgtaatatcggggtctgaggaacagaggctggaaagtagactgcagttcatacctatggaaagatagggcagggagccaggcagattttcttagcttgatattttttaacccctgctctgtgcctaacattgtgtaaggcacattgcagtataggtaatctaacttatattcctccctgtctaatagtttagtctgtatctaggagaaaggacacacacatttgaggaactttcagtaatgaaagaattgcaggaaaatgcagggctatgaaattttgccatttcaatggcaaaaaccacaattacttttgcaccaacctaatagaatatgtgtttaaatgctgtatgagttgggaacatgtgtggtgagctgagcttgctctggaagggtagcaagaattaggtgtgatcagggatgattgtgtagatcggtctgactggagtagagtattaacaaggaaaagggagaccagtaagaacagagagcaggttttggctttctctcataaccaatgtggagccacagaatgtgtgtgaaaaaaagcagtgacctataaacaatgtttttctgccacagtcatttagttagggttatgtgaatcagatgttccctgctccagtcccttctctgaacccaggtgacatttttatccttagttagaactacttctgtgtgtgctcctgtgaccaactacgttaaaaaaacaaacaaacaaacaaacaaacaaacaaacaaaaaaacgcttattgggaaggagagatctggtccgaaaagagaaggctcttctgattattaaagaaaaaggatgttcactttttctctaactccacggtgttaaggtctaattgtaagacccgttcttgccatttcattaaaatcagaggcatggaatgtgcagtgaaacttgaaaaatacataagcactttgaattttgcggctaatggttctccttgctttctttcattcgagctgctaattggctgcaggctactctgctaccctgggagcctctgtctttccaacccttttaaactcagctacaaatagctttataaaaatttaaaccccaaattccaaaccttgctcactccttaggtaggcaaagtcaactgcagtgactattactttttcatcagcacaaagaattatttccctcatgtagctggacaattatggtaagaggacaactaagcatccttttctcattatggatatttcttaatttccttagaatatgtttctgtcgttttacttaaagaataccaaggtcctgatgaggcattttcattggctgcgtgttcttagtctccagtataatgaatcatattgagttaatttatctctctttctcttacaccatgtctttttgtgtcgacaaaactgaaaattcactttccctcaccaggttggggcgtcgggataattgattgttaccagtctctgctgttagtagacaggataacaccagtgcctctagagaacaggtgaaaactaaactctgtcccccgaggccaatgaaatagctgtttggtcccttgtgtgaaacttcctaataacttaactgggcagcctctgggtccctggagggtttctccacaagagtattccctctctttgttaagattgcttattaaaaatgattttataatgaagttgcctcaaatagcagctcttttcctggttgtccttgaagctgtggtgaagaaccttagagacaactgtctagggttttcctccttgttaaaaaacttctctcttaccactcttgctcttgatttttaaggagacaaaatctaactgacacaagtccctctccggctgattatgtcgcttcaaacattgtgcaaggcattattggtagttcaacttgtcattcgggctcaggaatcgaactgatctacgtggagtgaggacagttaagtctgcagtggaaacaaggctgtagggcttccccctgagagcagcagccaaggaatgctgctgtcatgctgtcacaaactctgcccctgactctatcaaaacaatgatttccaattatttcatctctttggtcctagatttcttctatctataaactaaccactttcctgccacaagagactgtcatgaagaggaattaaatttaaaaaaaaaaaatagaatcatactctttgggctgggtgcagtggctcatgcctgtaaacccagcactttgggaggctgaggcaggtagagcacttgagccacagagttcaaaaccagcctgggcacgtggcaaaaccccatctccaccaaaaaataaaaagaaaattagctgggtatgggggtgcatgcctatagtcccagctactcaggatgctgaggtggaaagattgcttgagcccaggagtttaaagctgccgcaagctatgatcacaccactgcactccagcctgggtgacagagtgagaccctgtctcaaaaacaaaaacaaaaagaaacaaaaaacgaactatactctctgctaccaatggcctgtataaattcaaaaacttctaatacatgtaggcaattaggagaaaaatcggttttttattgtccacaccataaccttaacttctcggcttgcaagggcttagatgtggtgatgtatttaacataaagaatgataaagcacccggcagggaggctcgctgtcagaaatatctgcctccgatttcgtttctcagtggccaggcattctcaacaagcaacacaggaaacaacaaaccatataaagttgttagtgacagattcagcttgaaatatttttctaactttaaggcttgtcaggcagtaaacctgcagagcagagaactcaaggtgtggcttggcacttgttttgctttgcagtgtgaatacaacagaacaccaacagtaagagggacgattgtgaatcttttagggaagagagcccagtcttgtctagtggtaccaagactcactgtgtgctaagagtgtgataaaaatctgtcttggctaaattctattctctgagatgaggtatattagaaaacaccagccttacattcggtaattcctgctcctgcacaataaaaaagaaaagtaaggaaaaagaaaaactgtggctttctctagaatttgactgtggccttctctagaatcttctgattctacctccttagaaacaaggtggaatcttctcattcaacctcctgtaaggttttctgtcacctgaggagtctaaattctaagtatggcattcgaggccttttacaatctggtcttaatctttccactgctcttttcaggacttctcccatgcaggcagtgtttgccatcctcagtgatctgttcccaggagattccatgcatgggcatacctcggtgcctttgtatctgtagtatcttgtttgtcctggaatgtccttcatcatcttctgcacctataaagtcttattgctccatcaaaggccaacacaagtagcatctgccgtgcaaagccttctccaattccaccttgttaattgctgcagcccccacagtacattcttaaggtgacagtataaaatgtattgcagaatagttgctgtttatgtagctttgtcctactagatattctttaatttttttggccgggtgtggtggctcatgcctgtagtcccagcactttgggaggctgaggaggggggattgctgagtccaggagttcaagaacagcctggaaaacatagggagaccaggtatctacaaaaaaaaaaaaaaaaaaaagaaagaaattaagtagctatgcatgctggcacacacctatagttccagctacttgggagactgagctgggaggattgcttgagcccaggaagtcaagactacagttagcagagagtgcaccactgcactctagactagactacagagcaagaccctgtttcaaaaaaaaaaaaaaaaaaattatctttgtatcccttgggcttaacagagtgatcagtatctactatgtgctcaattaatacccgtagattttaaataagtgtgtctgtatgtgtgtgtatacatacacaattttatgaccactcttgttgctcatttcagtttggccaaaaataatgatattttcattgttaacagctataagaaagaataggctgggtacagtggctcacacctgtaatcctagcacttggcgaggccaaggcacacagatcactggaggtcaggagttcgagaccagcccggccaacatggggaaaccccgtctttactaaaaatacaaaaattagccgggcatggtgacaggcgcctgtaatctcagctactagggaggctgaggcacgagaattgcttgaacccgggagatggaggttgcagtgagctgagatcacaccactgcacagcgagactcagtctcaaaaaaaagaaaagaaagaaagaataggtatttattacttgaaattatattgtgagatttgcattataatagtttggaaactgatactataattcaaagggctgcttgacatctggcaatttaccatatgcattttgagtctcagtattagggctaaattttagggctgatagctttaaagtttctttctgcagtttgtaagatttaagtcagaatcttatcgagaggtttaaaaatacttgcctatctttctagatatgaagaatgtgttaattttctgagtgacctcttgaacaccatttgtttgcattatccatgtaaatcagatgatcgaatctatagagtaaaaggtaaagggaccattttcagttaccattggcatctacatttatgcaaagtaggaaactacctactagaaaagagaattggctgacctttccaagaatgaagggtgtatcctatcaagggaaatatcctgtatttgtccagtctagagaagaaaaagtaatcctaaaatgtttaacagtttctgaagtagatgtcctgataatcccagattacttattgaattttaaggtaaattctggaaagaaatgacatttatttgttcaaggtcagaacacgtgacttgctatgtttgtctggtctagaatgtaagtatgtttccttagtttagcaggaaccaataatttcaaaactattgtccacctcatcagtggctgcacacaaccacagtttctgtgctcttttccttggaattcttttaaaaatgtcctttagccttcatatgcagcttcctccctacttttgtttgtaactttttcttgagtcaaaacaagaggagcaaaattatcccctgcagtatcaattgcttgagtggaagccttgctcataaatgagaggatgagatgtgacccaataaaagaatctattttaattttaatttatttcctggtggccttttatgcctccttaggcgatgacctaaccaattctatcttaacactgattttcttcttccaaggtcaaaaagcactttggaattattgtaaaaagagaaaaaaatgtcccttgcctgtaacgtaaagtccatctcttcttaggaaatttaaatcttactttctcagcttcacaataattcttttctcatgaggcgtctattagcaagctaaatgagaacaggatgaaggaagaagatcttttaggcttctgaagttgattttttgatagaaaggccatctcttatagcctccttcacccattttctttctcagatgggagtctttaatagcacagtgagaggagctatcttcattttgtgctgctctttcacacagccaagtgcaatcaaagtagaagctgtcctagaaggcctatggtttttgatgttggaaaaggaaaaactgttactatcacacacacatcctcaccaccatcctcctctcctcctgctcccacacccctcaaaaaagagtcctgcctggtatctctaaatcaaagaactttccatggcctgatttgtggaagttacctaatcctgtgtataattggggtgatttgagagacaggaagatgttctcattttcactaggggagccactcagggacagtatcatttaggagaatatgtttttattgccctaaattgcttcacctgagattctgttgatacgtttctcttaggttagatttctaatgaacaaaatgaccaatatgggactcattctcacagattttcctagtgctttacctactctttagtggtcagtgagttcttcctcgttctatcccagagtcttacttacaagaattctggagagttgggttaattatgccactgaaatgtagaagagccaacttctcacattctgtgtgtgaccaatcatctacatatcgtacatgattcttctattattttcaatagcaaagcctcattataaaatttctcatattgtggccaggtgtggtggctcatgtctgtaatcccagcactttgggaggctgaggtgggtgaatcacctgaggtcaggaggtcaagatcagcctgaccaacatggtgaaaccccatctctactaaaaacacaaaattagccgggtatggtggcgtatgcctgtgatcccaactacttggggggctgaggcaagataatcactcgaacctgggaggcagaggttgcagtgagccaacatcgcgtcattgcactccagcctgggcaacaagagtgaaactccgtaacagcaacaacaaaaaaagtctcattttgtaccattaccattaatttagctcaccttgcaatgctagagttttttaaaaacttctggaactaaccctcttggcataaaggctaagttgggtctatctcacattgaagaaagtgaagttctaccatattctgatctaaaattcatcattacgcccagctaatcactccactaaagtatccttaaataaacgaaggtatcttagattgaattccccagagaatagatgctcagattctgaaattgtcatacagaaagtttatgggagtgtgcttatagggacaatgcctatagagagtgagggaagctggactgggcagaaggaaaacttgaacagttgcaatataggcttcagcagatgccacagggagatcagagtgggggtggcccttcagtgatgtaccaaattgaagcaagggggctgcatcttttactctgcatcaggcagccattgggtgccagctgcacctaagggcataaccttgggcaaggcagctccactttagctaaggacaaatctcaggaagcaattcagctatgagccactggcagtcaacactcagggccccaggggaatgagggcctccatcctaaagggagggacctatgcagcacaccacagcatccactacagggggacaaaaatggacaagaaatctagcttttgtgaaaaacatgttttcttttatttaaaatgacacatattttattgcttagctaggatttaaactaataaaatatatgcttggcctcagcattacagtataccagaattgcacatactgaagaaaaaaaaatgtttttttctgttgaataaggttcttcgttaggatttctggtcctggaagcatgcattataaatcatatgtgtgtgcaattccatataacgttttatttttccacacatggacattccagagcgttaacacatttttctcaattataaaaatgaataatacatttccaaccatttgggctcacataaaatgtattcatataggaacaaaaagaatgcctgcaaagaactagttatacatattccatgttactttttagattttgacagtttgctactgtctaataattgagatacagtatctgaaatatttttgcagggcctatttatatgcatagcaagtctctctttttagtggtttatgagactccaccctcattttgcctgttagcaactacttgcaaattaagccagaattaagtaggagattagtggtggctatcaaagatgggaaccatcataagctaataataccatcccccaactgttgtcatatgagaaaaagcttctcagaaataattaatgataaagcacaaaatgaattttagtttcattcatcaaaatcccaacattacctctattttaatgaaatctgacttccatttttcttctaagaatgggagatcccaataggagaaaataaatccaagccttcttcatagagtgtggttgactgagaaaaagaggttaagtgtttccactctttggttcaatatacatcttcctaacacagacctcagcattctaaagtcccaagtttttctccatgcattcgtgggattttcacaagtcaaaatacccctgttccctctgggaccagaagcttgagataccaggtagttctggacaagggctgctagtttcacaggtgctgaagtttcagaaaaatatctgaacctctcgggttctgatggagtcagggtttatctaaatggaattaaatcttccgtagctttccagtgtttagttcccgtgcctctgccttggaaaagagggggccctttcaggttgatagtgaagttaattgagattattcttccccttattcaaagagaattaatagatgggagaaaccctttacctggtctcaaagtttccatggttccaacagcttctacctgggaaaatccccaaccattcttttggagatccctgtgtctgagtgaaaggaattctgaaactgcccatagacatcaatggcagcttgatcagtctgccctgggtattaccataataattacaaggtcccaggcagatagcagctttttaagtggcaaaatcactgttaggacagtgtcctgtaactcactcttgggccaggaatcccatgtatgctatatcaagtaactcatctacatttgccattttacagattgtgcctggcccagcacatccgattgcatgccttgtgcaactgcaccacttctttacaacacttgctgatagttagtacaaattacagtgatttttttatataaaggtagctaatgagctgaaatgtaaagtaattgctattttcaatggacaggatgaatctgctctttaattttttcctgaaaaaaaaaaaaaataactcctctattttttttttttgccagaatttcagtgagtgattcacattactgtcaattacacgcccttattatggattacagccactaggcagctgtccaggaaaacacaagtctgaaaatgcttctgttttaagaaaattaaattcatggttgctcctcctgtgggcatgtgcagcaggcaggaagcctccactttcttgccaaggaaagggataaggacttgcctactttatctgaattaaatagccactctgacatcttgagatcttgataccaatgcccagatgtagggcttggttttggtttctaaatagttttttttttctttcagtgtgtgttacaaaacacagactggtgttataaaacagtatttctggttatgagtcacagcagtgcctgtgtgttaccagagaggcctcatggaagctgaatggagaaactgttcacctcccttcttcccaaaagtcggagttgacagtttgaggctcttagctctgttttcaaagatgtcctcgttgccagcatatgcaggtagatttctttttaaggtgcaggtgaaactacaactgaaaatactatctgtgctgttaggctgctccacggtctaagaaatccagcttttatatgggcaaaataaaagctgctaaagtctgtcagaggtattcttcctaggaatggtgtaagatttagcaaaatatctttaaagcattccattaaggttgcctaaatcatttatgcatttgggaaaactgagaattacttgagatttttccagttctgagcctttaactacatttatatctgattcatagaataagacatttcaaataatattgcgatgaagctgaccttcacattatctgtgttccagatacattgtgtctaagtaatgtcagcgtctaaaagaaatatttaaaagacaaaggattgtgaattgggtgaaatcagtttcacctcttagcttgtttagatgctaattcaagccaaaaactgaaagaaaaaaaaatttttagatgattgatgaaatttgaatattgattggttctttagatgatagtaaataattttttaatattgtcaggcataatactgtcgtggtagtggtttttaaaaaatccttattagttgagatgaagactgaagtagttgtggatgaaatgacaagatatccaagatttactttaaaatgctccagaaaataagtatgttggggaggactgggaataaataaagccagagtgataaaatattgttttagcagggggatgggaacatagtggtagattatgctattcaatttttttatgaactcaaaaatgtttgactgagttctttttttcacctccttgttgtctgtgatttatcagatgattatttttacatttggggtttgatcactttgggtagttagtatttagtgaggaggacatgacaaggatgaagcatatcaagttcaggcagtcaacgatgatctcttgaactatataaagtgtatgcattgctatgtaaattatgcattgattgttagcatgcaagtaagaaaagttaccttttatactaaggttgtctgaccttcctttcaggtagcgaaaaggtgcaagcattacctgctcttgttttaaattttttcccatgttttcatagtcattaaggcctagatttgattgttggatggactagagggttaacttcacctcccatgttagagatgaggacgttttctcagggcagtgtaatgtgtcttgttcaaagtcagttctacttgcttacagaagtggaagcaagactgggacccttcaaaatcagtacccttttccactctatcatgcttcgccaatcttgtcctttaaaatactcattaacaatcttccctccggggatcaaagcagttttctaaatccagaccagtgactgagtgtcagatgttcatttcaggtagtgtggccccaaattatcttttcttttattgaacatgatttccaagttgtgtgatgagtcccagaagtgatcctttttaattctgttcttgttaatgctctgcagcaggtttgcggcatgttcctcctcctcgggcttacacagactttctgtcagggatgggtcaatatactccaatgacagtctaggtagaaaggaggaaacacttggccagctgattccacaaggaccatcagccacttctacagtgcctttccaaaaggcactacagaaacagtgccttttttctactttaaggtgaaattccaaacatcacaattgaaatagaaacattttccttcacatgggagaacggaccctgtttagtctttgtggccaaagctctttaagcacagacttacctgtaacatgttatcttctttgcacttaatagcagctcactgagataaagtagattgggttggcatttattaaataatttttacaatttaaaagagaggttttcaagagttttacaaatagcaaccctctgatttctaaacacgtggttgtgcagatacatgtgaaaacagaaatacatacagaagggctttgccctgttggtatggtctgtggggagatcaaccatgaagtctggtcctctcttctgcccattgcagagattctggattctcttgtccatcagattcctaagaaatgcagattttatttatgcatccaggaatccccttgatctccctgacctcctactatatggaaagcaccaaggataagagaagaaaatgggccaggcacagtggctcatgcctgtaatcccagcactttcagaggctgaggtgggcggatcacttgaggtcaggagtttgagaccagcctggccaacatgatgaaactagctgggcgtgatggtgcacacctgtgatcccacctactcaggaggctgaggcaggagaatcactggaacccaggaggcagaggctgcagtgatccgagatcacgccactgcactccagcctggacaacagagcaagactccatctccaaaaaaaaaagaaaaaaagaaagaaaaatgtaatctccttccacccgccactccccgcttttcctttttttggaggaggcagtggtagagagagagaaaggccacgaatgcaccatctaaatattttggatggagaggccaagaaaagagacaacataggaatccccacccctcactgggggtcctggaagtcaccgtggatgaagtgttggctaagaaatattccagaacctgaagagcagtgaaggaggaaccgagagagcatctcaggaggagataaagggaagtgcagtgataaacgtggcaatttatctgtgtccaaggtatagttaatccttaggattttataaactcattttatgttttcctttttttcttgaagtatgccttatagaagacttagcttacttacaacccaagagaataattctgcagaggagtcaacgattggacaggtgaacacagggaagtactttgtttccatttcaggctcccaaggaggagattctaaagggtctgcacgctggcatagctttttaagaactggctctgttgtctacacagggaagttcattccttttctggaccctcaattacagcataatctgactggggagtaactcctttagtcctccaggggcaaaggaatccacttaccttggctttgttcatagaaatatggtttgtcccattgtccagagctctgtggattctgcgtcggcagttgtcatggagagggcctgcttccccagggggtggggcaggggggtattggcataagcaaagctacagttagacccaccaagatgcaatatccaaaataagaggagagggatggggagagggagaggaggaggagaagaaagagacggagaaggcagaaatgcgtaggtagctttggagctcacccaggggcttcttccacaagccagcctccaacctggcaatctgaagacaaggccttttactttgttcaagaaaccctggagatttgtggtttctaatattcacggtgctgtgtgccaacccacatagccaattctgcaagcaactagtgctgcagacacatgacccatatttctcacaaatcccactcttcagtggtctttctattcttctaattataccaaaaagagagtcactagggagtaataatctctcttttgctgttactttgtagttgggtcccaaaccacgggctttcctctatcacagcttaagtgtggtatttttatcttagagcaagccaccactaatggggaggaaagaggccttggcctcctagagtggtggtcaacagatttatctgttacttttccttcctttttaactcagggccttatttgatttggcttgcctggacagacggggagatacctgcccagcagattccaaccagtgtgcattgtgtggtctggctctgtggcttagttttccaaatcagatactcaaatggtgtgtgttgtgcaatccttaactaagttatattccaagtacttggtttcgaggaatcttgcaaaatggaggaagttcactatttcacaagtttgattactattgttttaaaaaatgaaaaaaaaagaatctcagggttcaatgacttaaagattcctttttaatccatacctgtcttatagagcatactgctgtttactttgtctagtaagttttttatatacatgtgttatctcccctgctaaattgtaaacgccttgaaggcaagattggtgtctgtctgtttttgtatgcctccaaactcgctgtaccattacataatgaaacaaggcagacacatatgcatgctgcactggggactcagaaggccctagttttgagcctgctgtttcctggctgtgtgatctggggaaattccagctaggcctggtttccgtatctgcgaagtgaggaagcaggactgcgtggtctcccaaacctctctcttcctaaattctgattctaagggccaatcagatgttgacttgggggaactagagttattccagtctttatcatcaatttttctctgaacctatatctcaaaaatagatcatctaaatttctccagtttggtagaaaatattgatttttacctccataatacatcaaaaagaatccaaagtgagaagttattgtacatcgctaatataatcactaagtgttaaattccttgaaattattctttaatcagctagcatggcttaatttatttttctttaaattaaaaggcttacaaatactgaacaaggatgagggtctcagaaaaggtgaggtacgttgctatggtctgcagtccctgtgcccagaatatgtgtggcctgttgacaaatacatgtgtctgtgtctgaggttgaaaggtactcccctttgcccttcttcagcaggtatgagtaaaatccgacgaaaatgaacatccaaagagacagagaaggtagaagtagtaggagactgacttctactgtaggaagctttaggagaaaggggtcacacgctctgaatgacattcattctagcatttgcttcctgactgcctactgtataccaaacattcctcaaggtgctggtatttgctaattgtattgtacagtaattgacactgcctctccttcctgcttgtccccctggagctttgagtccctggaaacactaaacaggtattcttaaagcaattggccgctaagtgctgtttatcatggcctatgtctcctttacttgctcccaggaaagagcttgctaggcctgaagggctcaaacacaactctgtaaccgctggggccttgccatggatatctgggtaactgtacacccttctgagccttaaaggaatgtttctttcatcctaagaaagagagaattttttaaatcagaaaagtttccatgagggcgacagagtgagactctgtctcaaaaataaataaataaataaataaaaatttaaaaagttgccatgaatttggtacattccattctcatgacatctttcccttatattttcagtgcatccaacaaatattactttacgagtccatctcatataccaagcccaatactagacataagagatgcagtaagtggtaaacaagtgtattcgtttcctatggcttttataacaaaataccacaaactcgggacttaaaacaatgcaaaactattctcttaaagttccagagatcagaagtacaaacccagttttattgagctaacactcagccagttccttcaggaggctctaggggaatatctgcttcccgacttccagttttagaggctacctggattccttgtctcatggctccttcctctgtctccaaagtcagcgacgtagcatcgtccagtctacttctgtccctctgcttccatggtcacatcaccttctgtgtttcaccctcttgtctacttcttataaggaccctgtgattacattgagcccacccagataatccagaataatctccccatctccagatccttaatttaatcacagctgcaaagtcccttttgcctaaaataacatatttgtaggttccgggaattaagatgtggacattggggagtgggggtggggacacattactcagtttactgcgttaaggaacacagcatttcaaatctcagagagcctcgggtctacttgcctagttgcatagcaagggagaagtgggatgggtttctgtttgcttgcttgcttgcctgctttgttttgaatgctttattctagtcatgcagtttcagtgcaaacaaatgtgtaaagtgaaatatgggaaaaatgtttgttaaattcaaattgtgtcaaggtcaaaaataaatcggcctcttctaaaactctaccttgaaaacagttcagtgtaccatggaacattttagggtacaaatcaaaacagttgcattacccctgtctcaggatgagaagattggaatcttcatttgcaaagagaagaaataagacttctctgtccttagccggtgagaagctttggtcaacaagtctttattcagcagctcctttgactaaaatgacaggcatgctaaatcccagctatctaaagaggcggccttcacgggagaagaagagaagctgcttcttcatgtaaagtgttggctgcaaaggtcagggtctcctgatagaatccttgctcctgttgagattttaattgaccctaaagctgtttgtagttttggacactcaaaagatgaaaaacatgataccctagggtatctgaaacacaaatcataacattaggcaaataagacagccaacatggagaaggaagaatttggccactatttgtaggaaatatgatatcagagtaaaaaaaaaatgagacaaggtggctgaaacagggcttgagaggcagacacagtcggactctgagctgagaaagcctctgaaagtagacagtgccatgaaaagtccattaccatgggctcaacttccatcacaaccacctacaagtaatgtggctgtgggcaggttatttaatctttttgagtcttatccgtaaaagtaagataataatatctggccgaataaataacatgttggtataagtatgtgcttcctccatgcctggccaatcaacatgcagtcattcatagcagtcactttgtgatgagggtgaggacgggagccctaggcttagccctcccatcactccttgttgtacgagtgcactttgtcttctgtggtttcccttgatattcactttggccaaacagaagacactggtttgtacttctgatttgcttcatgacctgaacatgttcaaatacgcacacacacacacacacacacacacacacacgcatgcacctgtacacattatgccaaaggacgaccttgtatctgtggctcatatgtggcagccagttttcccagcaaactcaagcactctaataagggtttgggctttgcccaatcagttgagatttgtctgcaggctcataggtcattccccctagcaagctaaaaaaatcactttcaaagtggttcataacctgtagaaacgaaagcccacagcgtaacatctcaggtaaaaaatccagtgtcactcagatcacgcttacgggctgaagtctggtgattatgaagtgaactctgttgttgcaaacctgtgtgagcatcaaagcctgtcatcacttttattggcaggtgccatgggctcagacagcaagagggcaggatgggaaagtgccactgagctagtcaaacagagaaacaatggagaggaagagagcaagcaccagcattgagcattttgatttttctaaaaatggacctatttgtatagcgggaactaattaaaacttacggccatgtggtttgtgttaaatgttaagtgtttcaaaatggttaaatgtgttctgtgcacttgatggaaatgggattctctaccaactaattgagggaagggggaaaacatggaagggattagttttctagaaggaaaatgaaaatgaaaaaatatgatgccaatttacttttcttccgcataggggatttgagaagatttatcttagcttttctggaaggacacatatgcaaatcatagaaccatggaatttcaagattagaaatcctttgcagtggccagtctaaactcctgtctattctcgggatctaccaccctgcatccggcttatgcgcaaaacctgtcacagagaatattcacttcttcatttcttttcaaggcagcccattctattttcgagccaatctggcttttagaaagttcttctgtctactaagtaggcaatctgtttttttacagtctctacccattggccctacttatgcctttcttatgcttttaattatctttaataatttcacagttggaaaaatgagctaagttgggttaagtaacttgtgcattattacatagctactaaatagcagggcgaggatttaaatcaaggtctgccagaactgcacgtctcttgttctttccatatgtcacccaacctttcactctagaggaaaaaaaaaaaaaggcagtctgctacctagcacagaggacacctaacaggaagtgaaggagaggttgagatcagaggcgggaagggagaattggtgagtggagtgatggaacaaggtaaaaggacacccctctttgatcagggctacactttcttaagccaggcccctgtggttatctcagtgtagctcacatccagctattgacagctttccacctggtgacatgcttaacggcccatgaaattctagccctcagggctcaagcctgatatttatggttccccacataaacctaaagtggattgtaaatttatctctctcagatttaggtggctaaagtggctgttcaaaactctgcaagggagagtggcctttatggacatgttgtactaacttttaaaaagactggggctgaaggagggtgcagaaagctgtgtggtttgtgggaatgctcccagaagccccctggagtggaagcctttttggtattgatgttatgggggaagggcggttgggtaaagggatgtagcttgattttgttccatagaatagtggcatgttttgtgtaatcaaaaatctgttacaatgaaaaaaccatgaaggtttgcaaaggagcaatcaagggaagctgttcagcttcggcaggaaactttttctaagctccagagtatgccaagtggatattgacatagctaagtatgtatgcagcgggacatatgtaaataggaatactctatgttgaaatctggacaaaccttactgagaccttctccagaggcaagcaacgtgtggtatttatatgagatttgatacatctggaaacagcggctttttcatctcttgcttctcggagatgaacttgcaccatatgcagggtgtcacttaaatttcaccggcaagttctgacatgtacgtttaagagaaaacttccatatgtttccatgaaaggatggggacatagtaacaaccaccaaagtgataatatttcctctgcctcacatccgctccctaatcaaaactgttcagtattctactccaaaagtttcttcctctttccaccgctgacaatatgcattgttaacggaagggagtggtcaggggctgtgtggcgtattggaagggactcggacattagaggcaaaaggacccgggtttgaatcttagcttttctatgtatttattgtataactttgggcttgtttcttaatctctaaacctcaatttcctaatccatcaaaaggggattaaaaataccaaccaaaacatggttatgaggataaatggcacgaagaattgaaaactaaatagatttataaaacaaaaatattgtttgcaaagggttggcatagttcctcctttattctggaagttaatttgcttggaaattcaaccatgtactaaatcttcctccctagggaccaacagaaaattgcaaactcctgagtggaaaccttcacgagggctccgcaaattggtgctctcttctcctggtttcatcccgcaggaagagacagtctccctatatgaatgttcacaccatgagaaacctttctcaccctctctccgtggaatttctctccccaatttttgagatatcctcgactcaaggccaaagcagtggtttgaaaggtgtttggaaaccaatgtgaaccatcgtgctttcccctcccccactctgggggtgggattttcaggccaacttttctgaagctacttgtgagttaacctgaagttggaatgccctcctgaggtcgaggcataaaagccagcagcgtaaatagaaactgaagctgaaataaccataaatgttctcgaacaacttcaatagagaaagccttgtttgatcctctctaagcttcctgaaaccaagctgaatatttgtttgttttgtggtagctccacttttttttttttcctcaggccttttaatgcatggctgttggtttctgtttaaaaggaaaatgctttttctcagtaacgatgttcacattctgaagttggtgatacccacttctaaaggccattttattgtaaagataaagttctgctaagtcttaggatgaaaagataaaggatgtggtcagttaccatgactcgtgcttacctcccaaagtgtgtcatttggtgcacatacctcaaaacgtgtgaacagaaagtttctaggtttatttttatacatggagatttgattccacggcagagggagggtgtcaaggtaaatgactgtgcaaaaatgacagaactgcattttgagctttccgttgccagagatacaaaggccaagttaaggtgagtttgctattcgattgctttttgaggggtctattggtaattaccactgctgtttaatattgcaatattcatgggacctcaatgtttacacagctccatggatgctcaatccaaattaaacacgcccaagaacaacacagggagaaaacacctgggggcaaagtgaggggctgcagtcacaagtgatcagatcttttgcagaagatagcagtagaggggcccttccttttggcctcctttctggcaaatgtgtttcaacaccgttaaactacatatgatattggactgattagcaactcctaacacagaatgttctgacgttagaagagctaggaagtggcgtgtcagggctgacatgcatggcagagttttcagatacacatacagtgtttttttctacaccctgcctccaaaatgtcagtgtccctaggtttctgtttgttgcagagcccctcaatatgtgtgtgggaggcagcacttgaagccaaaacagtaatggccagatcttctgtctgcagccatgaacacaaggagaaagtgccaggtgtcaggagcaagaatcttatatgccggggattttttttttttttcctggaagcaactggaaaccaacttagtgacacttaagtccttcacctgctacatgacttcagccagtgtatgtgagtcagagtggtaccaagaagggccctcatctgaacagccacaaaagtgacgggctatggcttggaatgggaatattatactgtgttcagagtcacggcaacttgaacttggcagccttatcggcttctgagattatgagtgccccacagccaagagcacctgtgaggagagttgactgtggagtgggatatagattgagaaacctctttcatagctgacaatccatgtaaactcctttaatatgtggatggttaagtagcagtttaagtgttggaattacctggccctgctttaccatcttctatatattcagtataagacacactgggaattactgaaagcttccctctcccccctcaaaaagagtggatggtgcttagaattaagaggatgtttccagggtgtctttcgtttccatcatcaaagcagataaaattaactctattagaaactgagaccccctccgtgaggtatattagtcataagttctctttgcaaaaaggctagtcttcagaggattgttaagatcagatttcatgacagacatgtttcaacatatttgtacttctctgaacatgctacatttgctctcatgtgttgtgattagctggtttcagtgtttaatccatggcatgtggcatttttctgtagtagtgtttctgtggaaaactttatcctaggcttgtggaagaccagttataacgctttggataaagtatgtccagcatttctaaaagctgcagtttcctaagaaaatgatctacgggcacctaaggttaaaatcttcagaattattttttgtattttctgaaagtgatttttaaatgaagttgagaaatggtactaacaatgcatccaatattgatataattagaatatgcatcatactctactaaagccaaccttctttaatatgttcatatataaacataaagaggtatgtggtttattgtatatccaatttttcatttatctgcaccttcttcaggatcatatttggaaggcacctacgtgctcacttgcaaacagaatgagacaccgtcatgctttctaaagcgtgttctctcctgccctcctcctcctccctcagtctgccttatattaagttagccaatcgaagtcagcattacagcctcccctttggcctgtgttctccatcctccttatataagccttggtgtccccacacctcttcacagccacctggtccggcagcctgtaatagctgtctcactcttcctcctcctcacctgatgcctgcggctgacccaactgcctctggggtgtgatcccacagattctgaaaacagctgcagcaggctgagggtggcttcctggtcacgttcatccagatacagagaaggctctatatcaataatgggcatcctctgatgtgtacttttctctcaacagtaaacaccttatatgatgtttttcagtatctcctgagtataaggtgctgggctcttctctctttctgaacagttctggttctttagtcctagtgcagagacagcctttgtgattaaaagacaaaaaaatgtactagtaataataagattttccaaggcagtcacccagtcctctcttctggtttgtttttctgtctttccctcacctcctcactcctgccttgggaccagttgtgcttttgctcaattcattcagcaaacaattagcaacaaagctgcaggctctggcagtgatcaaaacgctggctgaatctgccaaggtcttccaagcacttagaagaaaggccaggatccgcaaagccaggcagatttcgggtgtcacctatgcagggcttcataagtctctgtcttttctggctcagggaactaccccatggggtcactcacaaacgtgtatgccttccctctgtcttctatctgagtgcggcttaagggtataagcactaaggaaaaagcttaagccatcacagcatatctgagcataaaggaaagatagataaagtccttatacaagaaaactgaggcctagagttggcaagctatacccagaaagttagcaggaagggccacagaatgtactcgaacaaaagcaagaatgacatggcccatttcccagtcaataccaagtgaaccattttggaatgagaatagctagttacatctcttgctagactcctcttccaggtcataaacacctcctaccaacaggttactgagcccaaaaataaatatgggaaatttgcgtgtatgctgcactttgtattttctgcctccttctcaatccttaattaagctccgcagccaccctgtgaagccggtcattatcactgggtgaggaaacggagtcccacaggagctatgtgacttgcccaagcatacgagccagacaggctgggcagggtgagactttccagtttctgatgcccacgccccatgtgcaatccagcctcatcaccctgggtcttggtgcagggagtaaataaacaaatggtcacattgcttttacttctggagagcaatgggttcttattcaaaataggaacaaggggcaaaacaaatggcaagtagtaacaaaagtattgggggacagtggtgccaccattcgggggcttggaagtctggtctttctgaagcagtgcattcacttttaagtttctctttattgttcacatacccgggttttattcagcaaaagtgacacatgtctcactaggcaatgggaattcaaaagtgataccatgaggtccaccttgtattaaggttcaaagtcatgtgatcctatgtgatacaggctgtaatagagagatatctggagaaatatagaagttcaggagaggaaattaccctccctggggaatcagggaaggttccatagataaggtgacatttaaatagaatctgaaaagatgaattaagagtttgcgagttggaagcaaggaaaaagagcatttgggcagctatggtagaggtttgataaattatgacttcagagtttacccccatattcaaatcatgttccctataacttacagtggaaaactatgaaacaataagcttggccctcaactctggtgacaaataaactctccctgtcctttgagatgtccctcaatgtacttttccaatgccaaatgaaggtcaagactttgccagggtgtctgagaattcctagctttcagagcatacgggcgaggccccgaagttgtgttttcatgctcacatatggtgcggaatttctgctttttactgatttgtttcagtttatccagatatcttttacatagagaagtgtgtatatgcgtctgtgtgtatatggcacgtatatgtatatgctgtatatatgtatgataacatataacgaaatcagccccttaattttttaaaaaaaaaaaaaaaccctatttcactgaacattttactgcagtgggaagaagaggatgggtagtaaataatgggcttccttcacattaacacaaatgacttctaattgatctgtaaggaaattggtcaccttggctgatgcctataatcccagcactttgggaggctgaggcgggtggatcacttgaggccaggagttcgagaccagcctgggcaacacggtgaaaccccgtctttacaaaaaaatacaaaaattagccaggcgtgatggcgcatgcctgtagtcccagctattcaggaggcagaagcaggagaattgcttgaacccaggaggcagaggttgcagtgagccagcagagtgagactctgcctcaaaaaaaaaaaaaaaaaaatttatctgtcaagaccttgttgttagaatcttctagcagctgagccactgtagatttttttttcatcatagccattttgccacatgccctttcatctccctcctttgtcctttttgccactctcatccatcttctctctctcccaccctgagattcctacttcctcctctcctccttccttctctccttccccctccctcatgccacgatcctcctcgcccaacagtctcttgattcctgccactcatatcctcaaggtcatagcttatcatggaatttttgtaaaccgggacagttccttccctaagagagattttggaattacagtgtttttaatttctacttgttcatctgtgactcattatatatcagcacatggcatacttcctggcaataaagggaaaatcaatattatttattctatagatgactcagttaacgaaatagtactttgaggaggattgccttttcctattgttttactatactgtaattctggccttgaatactgaaaaaaagaaggcttagccaccttcataagacgggcccagtgattggcccccgcaaggagagatcctccagccactgaaatcaggctccctaaatactccaaaggtcatgttcattaggccaagtggctacttggtcaggacttcctaaaagtccaggaaggaggacacacaccagccacagaacacggtttgtctctttgggaagagagagaaggaggcatggaaatgtgaaggatacaaccataacctttcatttcttttgaaatgagctcaaatagattggtctaaatgtaaaacagatgtgaaaatttgggaataaggacatgagtttaccatgtctctgcatgtttacacgttaatactttgccgttttaaaaatattccataatttttaaaaagagaaatcccatgtcaaagattccaattgaaaatgaagttgcccttctaatgaagagacatttcaaaatataatcttcttccaagaagagacgtatctggggccgtcagccccccaaaacaggagacgactttcaatgaatgttattagcatggggcaaaaacctcaagtttcacaagaagttcttgttgcttgagttctttgaggcctttgtctcttaccactgttaatgtgtttaaataattaggggcctgtgtcaaagactcacatacctgtccacagaagccttccctggttgtttgaaagtcttaaaatcttggtaaaatagtcctctctcctctccctcatgctgcctgtataagaaatgttacaaagagctttaaggaattttctcaaattagtcccctcctcaagtctttttcaaggcaacatggaaatagtattgcaaaatcaatcttttttttttaatcccagtggcttcctgtgctattctagtaacttcctgggaaggtgagagaaatgcacagacattcccaaagtcactttggttactaataagtctcagagaagccctcatcacgaggttctgtccaagctgccacacactgtcctgaaccttccttctcagttttttatttattttttcccattctagaacagccagcaaatgatttcacacctttttgtttagctgctaaaagcaacacaataactcccctcagggctgcctctgtgggttccaaaaataaaatgggctcattttcatgctaagcattcaaaggctcataggaattctaatgaaaggcaaaggaaggaaagaaggaaggagaaaagaggggtcaggctagggggtgtcgccaaggaggttcagcttctgcctggagttataagccacccctgctggaaggcataggtagaaaataacatagtgcctaggctgcagattaaaaggagatctaatacaactcttaaactctccagccttatcttcttatcttctatcctcaaacccagggttattcttggaacacaaactattgttcaccaagaagagtggtagcctccttcagccttccagattagaaatctctcgaataggaaatagccagtgacttgcttccaagtcagaatataaaaccatggatctctgagattctaggttaacttttgaaattcaaagttctctgggcctaggtcattagcaatagcagacttatcatattccacacatgacagagtagaaagaacactattgatgcaaaccaaagaatattaaccaacatagaatacataaaaagatttctttttaatttaacttaatgtgtgcatgtatgtatgtatgtatttgttttgagaccaagtttcgctctgtcgcccaggctgatggagtgcagtggcgcaatcttggctcactgcaaccttcgccttccggattcaagcaattctcatgcctcagcctcccgagtagctgggattacaggtgcacttcaccaggcccaactaatttttgcgtttttaaaagaggtggggtttcgccatgttgctcaggctggtctcaaactcctgggctcaagcaatccactgacctcaacctcccaaatggctgccaccgggcccagcctgtatttattttttaaagacagtgtctctctctgttgcccaggctggagtgcaatggcgtgatcatagctcactgaatgcctaggcttaagcaatcctctcacctcagcacctagagtagcaaggactactggcatgccactaccacacttggctaatttttaaattttttttgtaaattttttgttgcctaggctggtcttgaacttccgggctcaagtgattctcctacctcagcctcccaaagcactgggactacaggtgtgaaccactatgccgagcagtgtgaagagatttcactgagagcttcccggaagtgtgcatgttacccatctacagtaagaggaatccttgtaggaaggacatagctgactagcagtttacttgcctgaaattttaacatccagaaaaggcagctgctcattatatttctaagcagggctttacttaggtatgaggccagactgttggaaatgtcctacactgactggaccaactctgcctttcagtagcttctactcaccggttccaaatttgtcccacggaatggcaccaaatctgtcttttcagatttggtcccagtaattgacaactatcaggtctctaccatcccctcctttttaagttaggcattcccattttcttcttttttttttctcctcacttggtttctacttacttccctgggatgtgatccactttaccgtgtccctcttaaagcacggccccagcagtggtctcacgtgcacagagcacagtggaaagaatgactccctgagctaaaggacatactattcacacagcccgagctcacctgagccacttctttcagcagatgtgttatattgtggggtcactttccttttcaagatctgtgaagaaagggcatgctaagcaaactctaaataggtttgctcagagaatcgcaatgctacttaaaggtaccaaatttttaaatgggttagaaggatcctttgacatacaaatacttgacatgcaaaatataagtccttattttttttttattaaagcagatacccgaagtgcctctacttggtaaacttaatatgagttactgtatgttgagtgtttgaaaattttctaattgtgtttctttaaaattatcccaggatttagtctttctgtccaaggaatcatagaatctttagaaatggaaaggaagctgggcgtggtggttcatgcctgtaatcccagcactttgggaggctgaggcgggcggatcacctgaggtcaggagttcgagaccagcccggccaacatggtgaaaccccgtctctactaaaaatacaaaaaattagccaggcatagtggcacatgcctgtaatcccagctactcgagaggctgaggcaggagaatcacttgaacccaggacgcggaggttgcagggagctgagattgtgccattgcactccagtctgggcaacagagcaagactccatcttaaaaaaaaagaaatggaaaggacatagatttttcaaatccagtcaccaactttcaggacgatatttttatcccattatacgtatttattcagaatccattcttcacatgcttcccaagggcctcctaggtacaggcattgttctaggtttactcagcaatgaaaagcatagtcccacaccaggtgtggtggctcttgcctgtaatcccagcactttgggaggctgaggcagacgagtcacttgaggccaggagttcgagaccatcctgggcaatgtggcgagaccccatctctacaaaaatacaaaaaattagctgggcatggttgtacacacctgtagtccagctactcaggaggttaaggtgggaggatggcttgagcccaggaggtcaaggctacagtgagctgagatcacgccactgaactaccacctgggcaatagagcgagattctgtctcaaaaaaaattaaaagaagagaaaagcatagtccccttttttcctggagctcacattctcatgggggaaaacagaaaataaacagataaacagtatttaagatactttcacatagtgacaagtgctatgaagaaaataaattagggctgtgatagagagtgactaggtcaaggatgacaaattttaggagggaacatttgacctaggagaaggtttcaagcacaggagaatctagaagaagcatcttccaagccatggaaacagcaaattaaaaggccctgcggtagaaataaacttggagtgttctggaaactgaaaagggccagtacaaccggaaaaaaaaaattttatagaagaaaaaagcagtagcaagtggagtctaaaaggaaagcggtaggcaggggcttgatcacatgggcctttgaaggctgtggtgaggagcttggattttactctaagttcagccacgggagggttttaggcagggtaggggcatgatgtgatttacatttttaaaatgccctctctgcctgctatgtggagatggattgcactgggtttaaaaacagaaggaggaaaaccagttaggaaggcatcgcaacggcctacacgttggactgacatggcagcaatgacaatagagagaagtggataaattctaaatatattccggaggtagaaccaataggacttgctaagagagatgcaactgatgtccagggggcttaaatgatttgcctaaaaggggagaaggggaagggcgccaacaaatgctgagcacttagtagtgccatgtactttactcctcacatgaatcctagtgatgctgcgagaggaatattattttacccacatcttctatatgaggactctcaggctcagagaagttaagtaattaactccaaatcaaacaaagggtaagtgataaagctgggatgccaacccatgcctgtttggctccatatctcacagtctccctccacgatacaacagtgttttccaaagcaatgataggggagaaactctgagcacagactcctggggtagggctccttctacccttttcttgcaaattattgatgctttatgacattgtaagcaaataccatcatcaactgcacatcttcccatgtcattatatttaaccaaaacaaggacgcctttctctcattactcttctaccaccttcccatgttcctcacaacccgtgagtcagggtcggctcagctctatgcactttaactatgagagacaggagcccgcctcccctcctgaggtgctgtagctggaaattgcttgtgcaacccgatgacaacttttctatatttagcagaaaaagtggtggcaaggatctgtccagctcaattttttttacagtttcaatgttcgaaatctctcagacaatctcctgaaaggcacattggccttgacagtatctgagcggaaggaaattttccccatctcacagggctgtccactggaagccgggacgtggagatccactgtagagcagagacttgacatgccaaacgctcctcccacaccttgctctacaccccacgaaacggggagacactggtcccgttgaagcttcgatggcttttaagtgttattctaagaagggaaaataagcatgaaagattcaagggggaaatggactatctcttaattgtttatgcctttaattgacatgtatggcacttggtttttatttcttttcaatgtggcatgcaaaaaaaaaaaaaaaaaaaatacaaaaacctgcttatggtttaaagaacaaagataaacttgcctgattgaaacggggaggaggggggtggtgaaaaaactgcagcaggtatttcaagtgcttactatgacaaaatcattgtcacagagactgcccatcactgatacttaaagtgactaattagagaaggaggcacggtttcgctgttctcaagccagactaacgcagatatagtatattgcccgtgactctgaccctcatccccgttggtcagccagagagaattatctactaatgaaaagcataaaaattaagaagagctaagaaaaggggaaagtagagaccattaaagtaaaatgggaatctttaagacagtaaaatagtgccaactgtatcacaaaaagggaaggtgcagggaaaaaaaattatttccactgaaaacttacttatagccctctgctttttaacatgcaagatgtatcagtcgttggttgtcaagggaaaaaagcccactacaaaagaattcctattagctttagaaatagcagttttaaggagtagttttttcataacttcatccagtccccaacctcattttgggtgaaatcttattcggaggaaaagcacttggtttagctatgtcctgtctcattttcacaaaacctcttctaatgagatgagttttagtgtttctgtgtctattaaggtaagaggtgaagaaatagaaaatccactttttgtaactttgcacttcttgggactaatgcttccagtactgggttctagatgttaattaacaggccattattaagaaaaaaagcttttataccatttgacaaaaaaaaaaaaaaaagaaaagaaaatacagttaaataaggacaagaaaaaaatcacctataaccccatcaccttaagctatccactgttaacaagccttaaaaagaaaacaaaattatttggcacacaccttgtagaaccccaccaggactgtcgtaattcaggccttctctcattttttattttgtgacagtttctggcaattttctacagatagatgggttgatatctttactcgtgccctagaagagagaggatctttttaacattaaatgtctcaatctcctcactggaaattttctttacttaagatgaaccaaaaggtacctaattcttctttatattactgtttctacaaatgtcaagaaagtcctttctgattttctgtgtcatagcatgaaccccaccctttatagacacaagagctaacactgcatcgttttcacctaagacctaaaactttaaaggcaaagattctctttctccaataattttagacagccttctggtatgtcatcttggccaccttttaagttgaaagaaataagaatagttaaaagaactttagaaaaaaaagaaagaaaaaaagaaagaaaaggactagggatggagaaactactgataaatgaataggcaaagagatcagtaaagtgctgaaagaaaaccccaaaacataatctcgcatatgtaaaaagaatcttgcatatgtgtcaatagaatacatatataagctgtggggaaaaagtaataaattgtgcatgatgatttttagcttatcagagaaaaataaatttttttcacgccgtataacaaatcctagataaattcaagaaatatttttgaaaaattaattaaataacgagaatgtatttctgcatatttatctagatacaggcagattttctctactttacagtaatagaagaaattacagaatacaaagttcaatacattgaaatatagagaaaaataaaatttttgtatgtcaaaaaagatcataaacaatcagcaaaaaggacaaaaagcaaactgataagaagatgtattttttcaaatattaaggcacaaaataaataaccttaatatataatgtgtttcattagtctgtaaacaattttcagccttaccagtaaatacaaagtatcagaggcctaacaagatagcatgatttttaaatgacattaatcaattcagtcagtttcagaaagacattaatatactgtgaatataaattgatacagctttcttggcgataggtactaaagtcttgaaaatgatgatactctttgatttggtaatcctacttccagtagattattctaaggaaataatttaaaaagtaaagattaatgcacacaaaaaccatgtttatttaatactatttataatggctaaaattctaaacactctgaatgtcctttattaggaaaattattaataaattataatatagtcatatgatggcaaattatactgccattaaaataatatttaaagaattaataaacacatgagaaaatatttttgattgaataaaaagtagtatgtgaaattctgtgcacagaatgattttagttgtgaagatttttaaaagcatacgaaaaaatagagaaaatactggcaagaaccctccctggatggtagtggtggttgcatttggctaataagataatatgatgcggtgatattttgtaggcttcttttaacttctttctaagtttcaaattttctaccaggtatatatgtattatttttagaaccttttaaaaaataagaaaaatcaaactacaaaaacaaaaaagagccaatggtaggcatccttttccttcagaaatctatgtcttgtactggttagtagggataatcagatacttctaagccaagagtggtactattacctacttttattcaagttcactccagagggcagattgctagatgattttggggggcggggattcgctattaaaagtaattgcaaaaaccacaattacttttgcatcaacctaatactttctcttcttgccctttctcaggttttagtttcctcttctcttttattccttcctcccacatttgatgcaagtaaaagccaggggaatgtaagcatcacatccctacctctttctaggaatagaaagatgggattgttttcacctgtcttccaagcctgggtggacagacagtagatgaagaacatcggtttcttgttcaggaaagggaagaagtggtttctgtgggacatgggtgagcttctttagctctcattcttgtagaactaaggtttctagatacacacagaacattcttcctcaaggagttcatttgagaatcacacagagagactatttaacctgaagagagctttcggcattttaaaaatggcaagtcttacagactccataaccactaccactgctaccaccacaaccacagagagagccagatctgaaaatacaggaactgatctgaaaatataggaactgaaaattcagtcagtcaaatttggagttgatttgggcagaggataggagatgaacaggctgaggatgtttctccagccaagacaagagtgcagcattttttttagttgaaattaaaaagaaaatgcagagtgtactttgtcccactcatttaccctaacgatcttcagcgtgtctctgtttctaaggaagtggagggcccaagtctctgattcatttccggaatgccacatagcacccttggatgaaagctcctctatccaagacgactttggaaacgccttttaaagtgttctttccctttacatcttggagttccattttgatggcagaaagtatattttaatcaatagagtcaaatgcagttaacatctgagtacacagattttgaatatgtctggcaagaaacaccttaataaagatgacaacttgacaacctcctacaatttattacataattaattgtggctattttttaaatatctagaacccaggaaccaggaaactccagcttttaaaatcaaattatctttgcatttagttctccccctttctcccttctccacatcaaaaaaatctaatttattccaaaacacagaattcagcaatacactaccatcaccctaaggtttaacattcttcctactaagaataagttaaaacagcacattatcctcaaatttggaggttaggaagagaaatatatgggaagatataacagctatccttaaattgcaatttgagggccaccgtcatttgcattctgcttgccctgaggcggcacatcgatgtgcagagtcatggtggcggcagcctggcctgggtgacagaaaccattaaagggaagcagaggggcaggccgtgctccgtgggtttcattagcttacttcttgtgtaggaggcaaaaggtatctgcagggctctgggcttgctaaccaaaccgttaatcgcttagaaacagcaagaagttcactagtgagatgtttatcacatacctggaacacgagttgactttctgtgagacatcattctggaatgaaagccaaaatctctctgctattcagttgaggctgaaaaaacaatcacatcagaattagtaaggcaaaagacaaagagagagaaatgaaaacaagccagtattcaatggggctagggggaaaattacctgggcttcaggaattacaggagagttggggttttgagaaggtaaaaaagtgggccaggtgcggtggctcaagcttgtaatcccagcactttggaacgccaaggcaggtggatcacgagctcaagagattgagaccagcctggccaacatggtgaaaccctgtctctactaaaaacacaaaaattagccgggcgtggtggcgggcgcctgtagtcccagctactccagaggctgaggcaggagaatcgcttgaacccgggagggggaggttgcagtgagccgagattgtgtctcagtgctccagcctggcaacagagcgagactctggctcaaaaaaaagaaaaaaaaaaaaaaagtggtagcactgcttctctcagaaagacaaatgtctggaatacacaagtggcactgaatgtctcaggtcactgagagaggctggacagaggactgtgggaaagtgcaagtactaggtgactttaaaggacatcccaaaagtccaggttgaagtgatttttaatgagaatgtgcatgctgtgtatcttttttacgtattctaaaagtaatagacaattacaattattttaaaactccatcattacagaaaaacataatattaaaaagaccccacccagagattatcactgtgaaaagctgggggtattcttcatatttctaaagaatatactaacatatattttagtctgtacatgtatatttaattctttgcttcaacaagccgttgaaaaggatactcagtttgtaacttcacagccatgtgaagaagaaaagaatatttagggatcattggtacataataccttgcatctctctgcagcatatgaaattgagtttcaaccctatttaaagaaggatttccctggtaaaaatacctttatatacatttctcaggttggaggaagataaaagaaactacatatgatatttgggctgggcagtttattttcatcatggttccttttaattactcagcaatttcaggcaatcatccactttcacaccatagttttcccttgtatacaatgggaagagggatagaaaatctgaacttggggacttggtctctgagcactgctaccaactacacctgccttttggcaaatacccaactcttctcagctgaggtcacacattctgccagctctcaggaaccaggaggctcaattacctgtattttcaaagacctctgaactctcttaggaagggggctatttaagttcagcgtcacattatccagttcctgaagcattcattttatagagatagggaagaaaagttcagagattgagctgtgctccaaaggaagtttggaaaaacgttttctatatattataagttaaagaaatgctttgtggtttgagaaaaatcacactatgcttccacacaaataatatacatctcagaaataaaatgcttaaattaaatattaatttaagatcatcagaattcgaactggcacacgttcaccttctccttcctttactgcaaggtgctctgtggttatctgctaccaacacaaacctgtgaaaagtgcagcattgctgctgtcactttataggtgctgctgtggcatgacctggtctgcatattctcagatctcagagccagcaccagattgtgatgaagtttccacaaaaatgagggcaatccattgtaaagctgccaactttatttaagaaataaagaagagagtgtccttcctacttttggggtattgaaatgttgctttcttttatgaattaatggtaattgaagatggtagctgtggggtttttttaaacacccttttttgatcaaatttaaacttggcaacagtatattgatcttctcacaatttcccaatttccttttcttttcttttctttttggattttactggcctgcaaaatccagtctctggaaaatatcagtctatggctaattctgtccatatggtaatagagagaatgcagataatcaccatttttagctcaaagtagcaaatccctcccctcccaaaacttgtgcctcagctaatgataagtaggacacccgatgcgtgtgagttgtatttctccctccaccctctaataggagtcctaaaattaagccacagaaggtcagaaaagaatgaagcaaggggaaaaataataataaataaataaaccagctggttaatggactcagtgtcgatgaacaatgaataaaagtatgccctatcattatttggaatatactaaaaaattattcattgtgtatttgaaattcaaatttaactgggaaccctgcattttctcgggccaacctacacctaagtctatctgaccctttagaaaatacataggtagtgaggccgggcgcagtggctcatgcatgtaatcccagcactttgggaggccgaggcgggcagatcacgaggtcaggagatcgagaccatcctggctaacacggtgaaacccccgtctctactaaaaatagaaaaaaattacctgggtgtagtggcaggttcctgtagtcccagctacttgggaggctgaggcaggagaatggcgtgaatccgggaggtggagcttgcagtgagccaggatgcgccactgcactccagcctggacaacagagtgagactccgtctaaaaaaaaaaaaaataggtagtgaaacatgaatttaagtagctactacacataaatagttattaataaaatactctttcggttctcttggggctttctagttttcttgtctacgtgtgaaatatttagattattgggttcttataaaagtatacccaccttctattaaacccggagaagagtaaagcgagttaacttgcccctggttggcttaccttgtaaaggagttgatagccagtgtttacaagcaggccctgccaaatcgccccagcggcccacctgtgagctggcttttcagatgctgcggagtaattccctctaacccacactgaagctccaggatctgaaagttcgcgggtgagaagtgaggtaagccaggagcctgtgaggttgcccttagccgtactgggcatgcggacagcacacatattctttgtttcttgttttcccctccgatgttaaaactaatacaaagttaaaagctctacattttttttttcagtattctacctggcaaaggtagagttcccccaccttactgcaaaacaaaagtaataataaaactgtcaagtagtgtcagcaacctctccggtaatatttgcagggaaattactttccacctacaaagttgacacctattttctgttagggaaatgaattgatatgagctggagattggcagggaagtaggagtctgggtcagatacctggtgtgcatttccttaaaatgcctaggaatgtggatggtgttttttcttttccttgaccacctcaaggttgttacagaagtaatatgagggggaaaactgtgaacagtgcttatgggagcaaaaatcaaaatgtggaatcagaggcagttttagcggtcagtcacatagccccagatgggctgcttaagattgggaaaagaaagctgggttagaaagtctcatgctgctggccgggtgcaatggctcacgcctgtaatcccaaactttgggaggccgaggcgggtggatcacctgaggtcaggagatagagaccatcctggccaacatggtaaaaccccgtctctactaaaaatacaaaaattagctgggtgtggtggtgggtgcctgtaatcccagctactcgggaggctgaggcaggagaatcgcttgaacccaggaggtggaggaggttgcagtgagccgagattgtgccactgtactccagcttggtgacagagcgagactccgtctcaaaaaaaaaaaaaaaaagaaagtctcatcctggcccaaatgccatctaccagtgtgactttgggcagtttgtgttgtcctctgcccatcagtttcctcctttgcaaatgaagggcttggacaggctaacacctgggctgtcttagccctatatctctaaggaggtacagaggagaaaggagttcctgagctgtatatgagactcacccacttacctgctgggacttcaaaggctatagatttgaaataacaaagacacgctccttggtttcttggtctgaccttcagaaacacaagtgcagccattctttttgccttccactgcccacccctaccttgtcagaagatggttggttggaccatgtgcttggtcgtcccaggagcctggggagctccactgctaatggttcccttggacgctgtacacacaggtcattgttatcttcctttttcaaagctgttacttaggttggatgaaaaatagcagagttcagccatcgtgattatttatacgggcatacaaagacaagacacaccactctttctgttactaaatcatactctggagtctgagtttctttgccatatgctttccgaggcttttcccactgggctagttctagacagaatctgtataaaacactgcccttttggtcagcagttcacaatgaacttggatgggaaaatatatactttccaaatcagggaatgtatattctgattctgtcctttgcatcagtgtagaactcatggtggaaaagatcaaagatttctatggggttctttccattctgagccctgaagctcattatctcatttttctaggtttcctcatgtgatggctgtccatttttatagcccaatagccaaatcataggtcttccattttatctttgtcattcagaagtattcaccagagttccctttttcttcttgggcttgtgacaacaccatggaagttaggctgggttccacccttgcctgccaacagcttttgtgttactttcattcatggaatacattctcagtgttgatttatgtagacgctcctatagcccttgcccctcccttgacctcagttattcctaatccccccatctttgtcctgtgaatgctggctggcctttccaagatggaaaatcactggatgacccgtacatctgtgcagcccacacctagtacattgctggcctttgcccaaattatgccaccccatttggtatgacctgacaccattgtgatcagtctgatgacctggcagcatcccatctgcctacccagttcactcttgctccatttcagggcctcttacagcaactcctcacatatcttcttgtcactgtctcatgccttctcagtctcagctaacatcagcccattcattgatacagcaagacaatttgagaaccactatgtgctctgccagagtgaataacaaaacgcagtacttgccctcaaggagcttagactctaatgagaaagacagacaataaagaataaacagtcatcctggccaacatggcaaaacctcgtatctactaaaaatgcaaaaattagctgggcgtggtggtgcatgcctataatcccagctacttgggagactgaggcaggagaatcgcttgaacccaggaggcggaggttgcagtgagccgagatcacaccactgcactccagcctggcaacagagcaagactctgtttcaaaaaaaaaaaaaaaaaagaataaacagtcaatccttataaacatcgaaaagctatgaagaaaacaatcggagtgctgtgagacagagtggcaggtggagcctatcttagatagtgtaggtctgcagaggtcacatttaagccaaggcctcaagaatgagaagcctgccagccatgagagaagaggggtagaaatacctgtggacttcaggctcagcatgtgagcagatcctagctcagggaaaagctccttgtgcttgagaactaaaacgggcctctctaaacccaccccctttccagacacctctttcacacagatgctgacttcacctgctcattctgattaattcatctcttgagctgcaataggtcattctctgggttctccttacttgacatttgggtgcataccgtcttttattattcagctgtgtggaagatctttacgggacttgagttcctttcttcacctctccaagggcatcagtcaggcttctatttatgtggaagatgctgaagaaatacttgaattctattcagttcaataaacattaattaaatgcctggtctgtgctaggtggtacctgctgggtatttaattcagtgctggtgtttaaaaataaccaagcctggcaagatggcaagaccctgtctgtatttaaaaaaatgtaaaaattagctgggtgcagtaaacatacctatggtcctagctacttcagaggctgaggcaggaggatcccttgagcccaggagtttgaggcagcagcgatttatgacagtgccacagcgctgcagcctgggtgacaaagcaagaccccatctccaaaagaataaatacataaaataaacaaaccccagtctaaccatgagaaaaacatcacacaaacccattaagggatattctacaacactgctgaccagtactcctcaaaactggcaagatcatcaaaaacaaggaaagttcgagaaactgtcacagaccagaggaggcaaaagagacatgacagctaaacataatgtgagatcggatgggatcctgcaacaggaagaggacaccaggtaaaaactagcgaaataatcagtaacataccaatgttgattccttagttgtaacaaacacaccatagtaaagcaatacgttaaccagataataaagtatacaggcattatctgtactatttttacaaatttctgtagctctaaaactatcctaaaatagtttatttaaattaaaaaataaataaataattaagacatgttccctgctctctataagcttatactccaggagaggagacacacatctaaacaaatatttgcaactcagtatgataagggtaacaataaaaatgtatgccaagtacaaaagtagtccatatgaaggcatgattatctcaaatttagagaagaaatcactgaggagggcaatgcctggagctgggttttgagggattaataagagtttgaagaatgtgaaagacgcttggaaaaggttaatttgagcctaggaaagggcatttgacaaagcctggaattttttcaaactatttggtattgaaaaaagggaagaaagaaaagaaaagagaggagcccagctttggaatttagtcaacaattatgggagaattgtaagtacctcattctttgtggctgggattccactgcccatggcagcagattcacagggcctctgagcattatcccccatactcctccccatcattctccacccagctgttggagccatctgtctgatcaccttggactccatagtacactggggcaaagcacagccccagtttctggaggcagatgggtaaccaggaaaaggcatgaatgagggggccccaggagacagtgacttagagactgaggcaagagtgccgtggtcaatcatgggtcattgtcttcgaactggacaggccagaatgtctgccacacccacacctgcaggtgaaggagccagaaggtaagagccactgagagcaagttctttgctctgctgatcactgtgtaccctccccccaccacccacaacccaatgtctggcttaaagtcagttctccaagaatatctgacgagtgaaggaaaagatgaagcccatgaggactgttacccttcagccacagaggaatgaatcaaaatgggaacccgaggtgggatgcccaagccaaaggtcaggaggtgaccagtgaagtggctggcctccaacagaagggtgatctctcaagtcctctcttggggaaatctgaacaggaggaggcaggtaggcagcagctgaagcacagagatttgaggtggagaaggtcgtgaatccctctgtagaaggtgctgttataagtaagcaaagtctatgaatgagcccaatggtggtgagtgagtgagtgagtcagttactatcagaactgagaggcaaacatccagggaaaggcagtaaccttaaggcagagaaactgttctgcccacgagagggacagcaagagagcagcagattttcccgatcctgtttctgtgcggcccacccactctggtgacagtgacctctacaagcccaaatgtcctatcaaatgggggtaataacagcgacagcctcatgggtttatgatggggttgacaggagacaatccacgcaaagcactgagcaccatgctgggcagctaagtagttcatcaatgatatttttgaggttgttgttttataattcttattaaattccatgagaacgcggctactcatattactccatgtgcattcttgcaagaatcaccctttagtttggtgagtctttgttccttgcaacaacaacaacaacgacaacaacaacaacaaaacccgaatttcaaaacgatccctggtcagagttgcaggaactatgaaatatgtttgacacagcccagtggaggccctaatccctagggatcattttccctgtcagttccaagaggggaattccctgtatgctcagctagctgtttgacagtgactggtgcagcttgtgggcttcctggtttggggaggttgagctcaaacagacaccaggctacccaccctgggttgaactgtggggaactagagaagttagaggcagggaaatagtcgtgagctaacacaggctgagcattcctggtgtccctttgggctccctgaggcagcagcgtgctgagaagcctgtccctgctgaggaaggaagaacgtgggagctctgaagacacaacttgtcgacccccatccctagaaaatgttacaaagctcatattttcactttgttgtttaatcagtggtttcatacaccattagcattattttgttttctgaataggacacataggtacatgatacaatattcaaaaggtacgaaaggatgtaaagttagaggtgtaagccttatgccttagccacagttaccaatttcttatgcagccttccgaaaatccattctataaatatgttagcatgatgaattcaaacatacatattcaaatatatctgtttgtacacactgtctgcatcttgattttttcaattcacgccacatctttagagataattccatagcaatttcgtacacaatttccttgttctttttaacaactgtatgatattccattttaatgatacaccagacgttatttaatcccctaataaatttttaatttgttttcaggctttgcaaatacaaacaaagctacagtgaatatcctcaaacatgaaccattttgtacatatgcaaatagaggtacaggataaattcctagatgcggaatagtaggacaatggtaaatgcatttgtaatattaatggacgttgcaaagtggtccttcatggagactttgccagtttatgtggccaccaataatgtatgtgagtgcctgttgccctacaacctcaccaaacataatgaataagttttttacttaacaaaacaaaaaaaaagatttgtttttgtggtaaatctaaacatggacaaaagccttttttctgttgttgttgttgtttttctgaagcccggtctgtgtctttctgtatgtctgtgtctcttaagtacatgcacacccacaatcccttgccctctctccattggagcttggttgaaaagctttaatctaattatttcttttccacattgtagcgggttttagtctttggtggtttgaatttgcaaacgaagaaaagtagttcttgggcaagtgttttcactaagccctacatttcccaatgtagagggtctttaaagctttccagaaacgattgctgctctcaatatgccagggcccatttcttggttaatttttccaaagccttgataatactgaggggaatgatactggggttgctaatgctcagtatttacagagcttctttgtctgagatctcaaagcacttgacagcattaaatcattgttcccttggccctctcaaaagcatctttgaacacagatggatgttacacagaaatgaaagctgtgctttctatccaaattgcctgaaaggtgaccaggaagaaaataccaactaaccaacatagtttgtagccatagtagcatgtccctttatttacctcaaacaatttaccttttgtagatacatttccaatgaataattgtgtgtgtttgtgtgtgtgtgtatatataatatatatgtgcagcaaatatatatatatacagcaaatatatatatactatatatatatatacacacacatacagcaaatatatatatatatatatatatatatgcagcaaatggaagaggacctcttccatacatgtggtaatgaggttaacttatatcagcgggtcgtgtccctggattcaaaggaagatatgctaaggtctttaggcctcttgactctctatggtctaagtctctgctagtctcttctatcagataaaatatataactatgaccaaacattgcttccagtggtccaggaaaagaaagaaggaagacaggaagggaagaagagagggatgtagagaaaaaaagaaggaaggaaaggtggaaaaaataaaaaccctaattcagatctgatgtttctttccaatgttgaacaataccttataaatagaaagcacagcctggcctcatgcataatgtttgattccaccagtgagtaattgtcctatagagtatttctgcagtcaccccaccataggcctccccaccctttcccaccccctactctccacctgctccatgtcctccacataccatacacagaattccaaccttcgagcaagaattttagtgggaaaatgttggcaactatcatctcatatttcagatacagaaaacaagtcacagagaagctataacttatttagtgataaagattctatgttaggcacacatatctcaaactgcgtctcctgggtcaaaaatgatcaaccaatagttttgattttaaaaaattatttaatacctaaataacactgaacatcaaaataaaagtaaacttactggggtcctgccaccccaactaatcatactgctttcatccccctctgtatcctttgtccatattcacataaagcggtaaccagagcccacagcaacataatgttatgggcaacagcctggctctggagccaggccacttgtgcttatatccaattccaccattgactagctgggccttagttcccttgtctgttaaatgggaacattagcagtacctacctcatggtgctttcatgggggaatcaatgagatgtccatgttaagtagttagacaagtgcctagggtatatcagccctgggtaaatattagctgctgctgttattatttttaatttttgctttctgcttttaaaaatgtatcataagcaagtgcaatagaattgtagttgctgatagatcccaaatccttgctaagctgactgccccctcctgggcattactaaagaattttaaatattttagactgacccctctccagattcctgggggtccctacactgcagagaggcaagcaacatcttttgggccctcctctttcagggactttgcagagcacacctgtggtgggcttcactgctatcctggctcttttacactgtaaatttcaaggtttcagggaaaaaaagaagggagtgaataagtgaggcaagacacagggaagacacggcattcctcagggtttccagggtctcactgggtagctgcaaccttgcaatcaaagattatgacatggccgggcatagtggctcatgcctgtaatcccagcactttgggagactgaggcgggtggatcacctgaggtcaggagttcgagaccagcctggccaatatggtgaaaccccatctctactaaaaatacaaaaattagccaggtgtggtggtgcatgcctgtactcccagctactcaggtggctgagatggaagaatcacctgagcccaggaggtggaggtggccgtgagccaagattttgccactgcaccccagcctgggtgacacagcgagactgcacctcaaaaaataattgttttaaaattatgttttaaaattgctgatccttttcagaatgatggtaataaaaggcattggtatcttggtattgtatttctttctgtttgtttgagaccgggtctggctcatcacccaggctggagtgcagtgatgcagtcttgtctccctgaaacctccgcctcactgcaacctccacctcccaggctcaggtggttctcctatctcagcctcctgagtagctgggactacaggcacacatcaccatgcccagctaatttttgtatttttagtaaagacggggtttcacatgttccccaggctggtctcaaattcccgagctcaagcaatctgcccacctcagcctcccaaagtgctgggattacaggtgttagccatcacgcccagcctgcatcttggtattttagaagctgatttagtatcttttgtattttatacatttttgttaacattttgtgttagtataatttcaaacttatagaaaagttgcaagtgtagcataactaactcccacccaccctttatccagattcactaattattaaccttgtgctctacttgcttatcattctcatccccatgtataaatactgttatatatactattatagagggagtatacacatactatgggtactacatggagggaacattccgctttccttttttttgagtcacagtttcactcctgttgcccaggctggagtgcaacggtgcaaccttggctcaccacgacctccgcctcccggattcaagcaattctcctgcctcagcctcctgagtagctgggattacaggtgcctgccaccacgcccggctaatttttgtatttttagtagagatgagttttcaccgtattggccaggctggtctcgaactcctgacctcaggtgatctgcttgcctcgccctcccaaagtgctgggattacaggtgtgagttactgcgcccggcccccaccctttactctttttcagtgtagatttcctaggaacatagtctttctcttccatgaccacagtacaatgatcataatcagggaatgtaacattgatacaatactgttccccaacccacaatctgtttttgtatttttaaagcctcgcttaaaaagcaggtgtgggacaaagatgataaatgtacatcatagcctaattaggccacttgttcacctggtgacctccccactggagtcattcttcaaagcccagctctaacaaggcacccctgcaagcctgtgcaggctgctgtccccacctggcagaaataattctctgccaggtagctctctgtgtgtgccccggttatagcccttcatgttatatagcaacaatttactctctggctccgcagtggactatgagcttctctgggtttccagggcctagttgggtagctgacagataattgatgcttaggagatgtttgttaaaaaatggatgggcaaatagacaaatggaagcctctggtgggctgaacttgataaagaggtattttcttaaaaaatatatatatatatattcgatgaaagttcagagatacacaatacagtgggtgaaattataagttcttcttaggaacatcttagggcaaggaagacattgtgtatgggatcttggctcatgcctcactgccactccctcaaacttttgtctcctccctctacgccaaagcatagtaactgctgaaagaatacagttatgcgcaggaagcgtgtatagactagactccctgaagagctggtgcctgtgagcataagaaacgcagcccgggattgcagcacttggcagccctgggctttccatcattcctgccacgttcacatgcagtaactttccgtgccggctctgagctgctagtgggaggcggagctccgggctgtccccctctccccagcagccatcagcgccagggtgcccggcaactgtgccttggactaacccgaaaagccacacatcccagacctgggagcactccagccaaacgagtttgtggcagaacctggtaacttccagagcctttgaactggagtgtggagcttactgctttcccaaacacttctcctggaagatactgtcaccagccagccccttggtcccagctgctgctccctcccaggtccatgctggtgcaagtgtcacaaaacagacagtaattgagttcagcctttattgagcagctactctgtggcaggtactaccctagatttggacattaccatgttacttaatttttattttcatttaaaaatacgtaccatttgctgcatgccagacactgttctaaccacttaacacataagaactcatttgatcctcatgacggcctatgaagtaggttctattatgatttcaattttttggatgtggaaactgaagcacagagagattaagtcacttaagggatgagatgtggtccctgtccttatttgagctaataccatgaggtctttttccctttcacattttctatgttattttcacttactttccatttgatggttatctcaaaaatattattcagatccatctgtaaatatgcattaatacttactgtgcaccagatatcctgggactccaaagaagtctaaagtagattcctcactctaaagcaacagagtttggttagggtaacgaagcatctatactttagctacaaaaggagatagtgagagatgctgaccgtgggaccttcaggagttgaagggacaggaagaatcttaggggcaggaatgactggggaagacgtcagagaaggtggatggagctcttggaaacctgaataaatgaacagagagaatcagcctagtgaactacggctgtctgtccattgaggcctgcaaaagcaggcaaagatgcggtacaccttctgcagaaagtgcctcaaacaatgcctgtggttctggatcttaaaagcataaagccctgaaatcttgagtggtttggtggacctcacagctcctgagccacagtgaagtggtcaagatggatgatccttgtgtgataatacattatgactcattatgataaagtggcaatacagaaaatgtggggaccaacttgtaggcagaactcccgcttgtatgcagacagatttcaatgctatgagatgaggggaaggagggaagcagctaatgtgtttagtgttacaggattactactaaatttctcagttgacttatatgttatgatattcttatgcaataaaattttaaaagattttaggaaacaaagcaaaacaaaatttcctcagccctgatgattatgaactgacgtaaaaggcatcatcatgatacatcatctgtgactatgggttgccatatttgtagccccaagatagtttgtccccaaattgttcaaatgcagctgaggtggctgctgacagtgcataaaactaaattcaatcctcaataataggaggagtcacaacttgtctttgtctccaaagaaagatgatccattgaagaatgtgtgtcaatttttgtagtcatttcgttaccacgatcatgctttaactcgaagaaagcaccactgaatcctggagtgcactttacattatgaaacattacagtaagcagttgatgtccaacatgattgcaattagagcttagtgaagcacaagaagggacaatccatgtaggatgcattagtgtaactgtgtttgccaggaacaagttttaaccttttgtacagctgttgagggaaaggtgccagtattccctgtgagaatacctgtcaagtttgcatttgaacagggaacacctagtttatgtttgtgaagaccactccctttttatgctgagcacctttgggcatgtgtcagcaaggaggtgttaaggcagatgggaaaaacaaatgcatgagcttcaaacccagcagattagcaagatttggagaaatggcaaggcaggaaaagttacaaagaaatcacctattcccataacatagaaatgttggaaagtgacatttggagagtgagaaggggattatctttaagaggtaaaactcaaaagaaggatgactttctcctatcctgaaatgagaaaatacattcatttttctttttgtcatcaaagtataaagaacatgttacctatgtatcctgcctcttataaagctcctggagaataaatactttttttttaagttgtgttcacatattttatagtgagttgaaatttggtaggggcaactataacataaagtaggtatcctgcctcctaatattttaatccagtcatccaacatttgacacatttttggggcactgctgtgtgccaggtgcctggggtgcaatactgaacacaaaggacgggcttcaagatgtgcgtgtatgggatctgtgtcaccacctgctacatgtatctgtaggggctgtgtgggtaggcaggggtcagagcagagagcaatgtagcagaggttgcccttggccttggccaaagttgattgagtcttgaatgctggtacccaagcattactccatcactgtttctgaggatggtgttactgtcagattcttagagtccccagtcacctctgccccacctccagcaacacaggagaagaaaaccagccaagctaagtgttactggccaagaaaagaaagatatggataactattaaaagaacatctgtttaacaccttatctgtggcctgtagtagtctattcctaactgataattaaaaattgccctcggttacaagccccattcacttctctatgacttcttagttttaagaaccagagtttggcttgccaagagtacagcagacttcttgagcacctcttatccctagctgcctctctatttttcccccatacccacagcaacaccctgacatagccaggcccagcctctggaacagtcctgcccaaacttgggcttagcaactgttatcaagaactggatgaactgaggcctccttcccaccacagggcaaatctgcccatcgccaggtttgaagttcttaatgaagaccaggctgagaagaagctcacagttttaggtttctctctctctccctctttctctctctctctctctctctctctctctctctgtctgtatgtgtgtatgtgcgtgtgtgtgtgtattttttctttactctttcttccttccttcctgattaatatagctcatcatccactgtgctatgaatctgtaacacgcattgaaattggccaatgacagttctgcaggcagtccctccgggggagtctatggataggatgttctccaagaggaattctcactgtcacgttctgccttttgcgcagttgcttcctcagaccttgctgccttcaaaactcagtacagagttcaccctttgctcctgtgtttctgtggtaaaaatagggcccccaaatttcaatggaccaggtatgatttctttgcctcaattagtggacaagcacttaatgaagactggggctgggtgctctcccttgtatgagtgattgattgattcaacaaatatgagcaataaaatggcacctactgtataccaggcactgtgatgggttctgtgactataacactgagccagacagatacactccctgtcctactgtactcactagtaaagaatacatatcatcatatcacccctgcctctgataagttgtgctaggacagaaaggagagaaagcttggggcgattgtgttgttgtgggcttttttgtttgattgatttcagaagcaattctatattgtgcaagtcttcccccaaatgcattgtcttttatatgaatcttgcccatcatagtaaaagcatgtacatcaagtcttcttcaatgtattttctctgagaactcaacctgttacttatagaggtagacgtgaggctggtctgagaacaaggggggttttgaggaccagggggtttcctacagcctttcccctgactcagcaaaccttgcagctagtcgagctgaacctggatgtacctcaaccacagaacgcaggtatgatcattcttatttgtgcaacgcacaagattactcagggaaaatcagttcatttgtacctgagaaactttctttcctaagctcttttcctgaaatgcagttctgacatgtttggggtctgtttctgttccaagatcagaatttcttaaaccccatgacccctggaattcttcacaacttcccccaaacacccctctgctgctcttcccggctcttgtttctttctgagccttcacaaggactcaaggaatattttctaacttttggttcacaacagataccagtaaaacaacaaacaaatcaaaatttctcaatcctcaccaaccaatgacagccctcgtgcaactgggaggttgcctggcaggtgtgggagatgagattttaacagacaacaaggtgagagatgagagggcagacgcatgcgctggcattagtctcacacacactgaagacgcgtcatagcaccaccctgagcacacacacccttatgggatttgatcaacacttttatcaaattgcttaacactgccaattcacatgttccctaatttaccttgctctcggttgatccccaaaccacaaatacatatgtgtgcctaagtttgtgcatgcatacattaaacaggacataaagtgttttatgcatgtgagtgtatatatgtggacaaaatttgaggtattttataatgctcttcacattgagttttataagagtccaatagaggtgcatttgcttctcctggagcaatggcactttttagaggaactaaattcagcaccccccaaatgagacatgctcataacaatcatgcttataggttgctcacatgtcaagagctggggcacatgggtgaatggagagtgagaaagcagagttattttcgaagcagccctctcaacctccatccacagaactccatgcagctaaggggtttcaggcagcagggcctcgtcagtcattccttgctcattaacaaaaggacttgtcatctgaagaactggttgccatgcgttgattgttaggagttcaggataaacaggtttcagcagcgcacaaaggttttttggcaaacagaaaacataaacaacttccttatgagctaggctggcagggagcagcttccccggacctgggctatcgtgagctcacattcttcctccacccactgaagattgctccctgttggttttgctgggtaaacgcaaatcccattatcagccttctcctccccggctgctgctggagcccccggtacagagttacctgcttagcaagctcctgataagtccttggaggccccatctcgtgagactttggggcgaatcttccctccccttctcattttacacttgttgcaaggtgagggttagagataccggctggggtgttattctttcctattactggtttcccagataagataggcaaaccttcaggacttagaagcactcgatctcaaggctccgtggagaagagaagccacccagtgcccctttatctatatcccctgaccccaagtgtggtcagcatgggctattacaggattcaaaatacaggaatcagagccatcagctctgccaagtgcactagcactaagatgaggaaacacgagagagcattaggacttgggtggctgtggatagtggcagctgatccaccaccaggttctaggaagcagaaagggggctgtgtgtgggttgacgctgttctgttttccctgacagctcttcaacctgtagctccctgagcaggctgttctggtctcaacttgagcacataaactgggatggagccacagccaagaactttattaatttaagggagttcttctcttttctgctccctgcattgagaaaaggtgcgttatttgagagcttactatgctccaggcagctatatgtatgtaagcatgtcagtgtctgtctgcatgtgcgtgtgtataatctcatttaaaccttatgattactataaatattaagtatcctatttcttgagaaaactgagttttagatattaagccatttgcccagcacacatggctagtgggtggcagagatgggcttgaaccttattctgtcaagccctgaagaccttgttctttctcctgtgccatgctgccccctccccacaaagggtcatagaaccgacacagaagccatgtctttataagccagattgtccgtgaactgcattccaaacccttgaatgcttttcttgggactttctcatcaatgcgccctatgaatgcctcttttcctcaaaaatacacagaaacactccaaaagaatcaaccttaatgctctttcctacacaactagaaccttccagaggttgcatttgtactgatttgccttgctgctccaatttttttatttcgatttagggtctactatctccaggtctgctcccctcagctgatggcccatgctccaaaattgtccttccttcctcctccccagcagtcaatgccaatgcttgcatttcctctgtgcgattaggaggaaagtactccattaagccaaactgtacttaacttcctgagatattatctttttcaaccgacaggcattgtagcctgtcagcctaaaaggatgaatttctaatcacacaattctctatttttcacttaaatgttcaaaagtcctgtaagaataaaggattttacaaaggaaaaaaaatgaccatttttttactaacctaccaaaaaatttccagttttcctttttcattttttatcatatatgtatgtcattttcatgtttttccaattatggcatagactcaatgttgtattcttttttttttcacataatttccccatatgagatatcagttgtttgtctgaaagaaaggctactgaggttgcagcagaaatttattgtcccataaggccttcccatgaactgtctacctgagattttgagggtgcccttttaccaaatagtaagaagaaagtctttccctttgacaccttttttttttttcaggtgactttgtggctgtaatcctaacacacacacacacacacacacacacacacacacacacacacacagatatcaaattgagattttgtgattattattttctcttatatattagtaatttttaggattttcaaaagagttcacaaagagacattcatttaatgaatgccagacgtgcctggcaatctggtgggcatgttacagcaagttgttgtatttgaatcgtagaacaaccccgtggaaaggtactattaccctcacaggtgaggaaatcaaggctcccaaggatgaagttccctgcccaactgacaagcgacaggacaagattcaaagctggatctgactccagagctctttttaatttgtcaccgggctttctctccttagaaaaaccttcactctaaagggttagtctacatgtcatttccaaggcacaccagagaaaatgtaacaaagagaaggaaatagagaaggttttatggtcaagtgacgcccctgtatattacaggcacacagagatacgaaacaaatgtaaatttattcaaatattatgagagaggcggttgtagtgatacatgttatacaggagacctattactcataattgattttactaatattttagcatctgacctgtttctcttaattgaattgaaatgacttatgcaacacatttgttttactgactttggaaagatataatcaccttcacctacactttaaatagaattaaaaaaaaaaattcctgaacagtggccttaaagataagtaaaaaaaaaaatacagtttccttctctaggaaatgcctagaaaattgcagttattttgttttaaggaggaaaaaaaagaaaaggcattttgcacaatgatcagtgaggtcaccctgaacgaaaataaaatatgtccattaaacccttcccaagaatcacagattgagtcactcaggagagtactaggagactgctctgccctttttaacttagtcaaaattagtaaatccaaagcccttaaaatataaactaatttcatgtttgcagaaaatactttacccctggggacagagtaaaacagagagagagaaaaaaaaaaaaaaaaaaaaaaaacagagagagagagagagagattcttctaggtacagaggtgtctcggatttcagcttccgtatgacagcaggcttgttctaccaaactgcagagaatgccagtctgctgggtttgctaatgcctggtctagcaatatactaagaatgacaattcaggaacataccagggaattgttcgctaaaggaggtaaaaattatgactctaacctcaggcttcaactgggcatacatccactagtttctgcccggggttagttgaggcttggaggaacatgccaaaaagaggggaggttcatttttatttttcaagttggcaggtcttgtcttgggaaggaaacagaattggtataccagctttaatggattataagatgactgggcattggacaagggcacaggggaaaaaaggcaagcaaaaagaaaaaaattatttttgagaacttgcaaaaaatcagtcttgctggccagtcctggccctaggttgacatctgttgtatgttagtttccaatgtgtctgtttcttaatacatgatctcagaacttcagtgatagcatccaaggaaaaattagaaaatgagcttgaggaaacatttctctgggttccttctccctgtgcccaacagggaaagagccgatagaagccctgcctagtctaacttgaggccacccattggctggtaggactaggatgaaacatcagcacctttaatgtggggttgaaaaacggaatgccaggaagttaaaaggacttaggggaaaatgtcctttggccttccgctgcgtgacaggattctgaagtggcagctagtgagcagagtagactcagttagtccagtcagaggaaaaaagcagcaaaaccagaggaccaacatcagtaatatctttgagtgcagtgatgaaagagtgaggatggctctgccagaaaggcgggtctctccatcaggtttcccaaagcagcttgtgtctatggccagctgtcagaggaaaggagccctgcctattggctggtatttattgagcacctactaggtgctaagagttctctagactcctcgtgcaaagaagactccaccttttttttttttttttttttttttttttttgcaaaactcaagattgtttgaggtaaagatacatgttgattttgctttctaccaagacaaagaaaatgcagaatagaattattaaaaagatgcattttcatatcactagaaaactcgtagtacataaacacagaagactttgaggaaggttaaagctatggcaaatcgaatccctttttcattctactcatgtcctattctggggctgattcagtgctggaaacatggtaggatatgaaatgaacaaccaagggttagagacagaagatattgaaacaagggtctagccactcctgctatggagattcccttggagatcttctgaggtctgagagattgaacccattcaagaggaaagaattttccattccccactgtctatgtaataatacccagcctggcagagtgaagataattgagcggcaatagaaattttatttacctccaaatgcaaattccctttaacttgtccctacttagaatacgttctttctccctttgtttgaaattaggaaagaccactggcccatacactttaggtgacatgacttcttagctttatctactacgaactttttattatcttctgatttttctaccttgcacaaaccaaaacactctcagtcctgaggagttatcgacaatgatctgcatgaaaacagaatcattttctaaagtctctatattttatctccacaatgcaatttatccacatggcacttgaatgaaattcaaagtttgtatttggatggtcgccctggattggacacagtcctaaagagcctctctgatccttttggtttttggggttttttttccttctctctctctctctctgatctcagtgttattgctcaattgtgctgtttctatcactgcctacttagtaacagcaatggggaacaagccttaaaagtgatcacctatcatatatacctatatatttttcttctgctggtctcataaaaaactaccagtcatttatttcatctcacttattgtcgatcagtcccgcatttttcacctccttaccgtgattttctttgtgctgtggttcccagccacagcccgcttcctgctgaattaaactgcaacccagacaaaaccaaagagcacgtctctcccaaagttcactcagaaggtcacccctggtgagatggacattgcagatgtgctagaaagatgagaggctgctttgatgaaacctgcgtctgttctttgctcctggtcctcagagtggaagatcggatggattgccattgccttgcattatttaagacttttgatgagcacctcccatcaaaattccccacagaccctggactgtgtgtgtgtagtgtgtgtgtgtgtgtgtgtgtgtgacttacacgacactttagaatgattgagatgttcaaaaggacattgccacgtgagctctttgcagggctcacattccattaggttgcccttccttaaggtctcttggtggcccttctgttctatttgatggcaatttctgttcattccagattgtattaaatctctttagcagcttcaaacggctctctcgagctgcaattttagcatgtgggtgctgatcacatcagtccctggacttttgttattttttcacgcctttgatggttttcctccctgcttctgttttcattggctcctactttcatctccactgtctgttctgcaatggtgttatctattcattcgacagagtccagccattcagccttctgaagaagaggccattccctcacttctctgtccccactttcccagtgggtagtccatgatttgtgcttttcatcaggcaaccgtggagacccctctttgggcaaccactttggtgataggatgaggattcgtgtatcatgatttcatttttatcaacctcttctgtgtcttcccattttgggttgagatgcggcggcttctgttatggcaggtatttttataaatggctttgtctgtgatcattgcaaatgatgaaaggtaggccacctcatttccatcttatggactttccacagatatatatttattgtctcttcctagagtgtgacaaatgatcagaacattgagcaggtatgagatgttgagggttttatttctgggtctgtcattccctatacctgagacttttaaaagtcatttaaccctaaggctgccacatttttgtttcctctaaaatccctgccattaatgttccatgttattttgcctaattaagtatttcacgttttaattcaaaagccctagtacctaatcatggttcttttctaaatgaattcagtatttcataccaagcaaatggtgttaagagcaaaggtctgtggagcagagatgccaaatgataatcccttaaatgtggaaaggaggtcagttttagacttaatcataggaacccttcctttctgctattggtaagcaaatatgaatcagcctgcctagacctcctgaccatgtgaatggatgaaatattaaaatgtacaaggaagacttaatgaaattaatgaaatacagggccataaaaatgaagagacataactgcaagtatattcttaacttctaaggccaatgtcatgatagacacgggggccctttgtaaactgtgtgtgtttctcggtcacacagaaaggaccagagactgtaaaacccccatcagatgaccaggcttggtatatgctcaacatcatatgatccggtttactgtagattgttataaggcctgatttattaaaatgtgtttggtgatttattggtgacatgttgttgaagagccatgtaaattatctctcgtggcaggaatgattagataatataaaaagtgtatgaacagaaagaaagatagaagtggtgacaaaaaatcttctgaagaagaaataaaaaacagcctcctgtttccttttcaaagtcctaccatggaaaactttccttacacttgccaacctgtgtttctcaaaatataaactcttcaggaacaggaaatcagttttcaatacttagcatcttgcaacatgtagtgagcactagagtgggagtcagaaacccccgttcaagtcccagctctaccatcagcggtgtgatctgctgaaccagaggcctctttgagcttcacttaccctatctgtgagtggggatgattcctgcctgctggatttttggtcgtttttaagtgtcaaacttagcctttcagctgcattctcattaacaacaacataatgataataacaataaaatgtaaaagcaatttggaggtggccacggtgactttaatacaaaaagtattattctgcatccaggacaatatgtggagtgaaagagacagaacacccaaaagcatctgagctccgcgtccatgtctaggacattctcagcaatcacttccctttcctccgtctatgcaggagccgagaaaatttatctcaggaccctcagctcctgccattgtagagtctgtacgatgtggatctagcctggcaggtggagaggcagcagtttccatgcctcttacaaattaactagttttcacggacgttttgcagctgccttggaaacaggctagcagttttgaaaaagaatcgttgcagccaagaaaaaggtatcggtatcatgtgtgtgcatggataaagcatacttttagaaacctgtcacttcacctgcactgaatggaaacaacgccaagttgtgtctatggctttcttctttttttcccattgaacttgctttaactgctaatctttctttctccagaattctggcaggttaaacattattatataaatagcaattgcaacaaataccttcacagaatgatgtataaataaacttgagccctgaacactcatcactccagtaaatatttacaaaaacattctagctttaaatagggggaaagggttgtgtttgaagagtttttactttattgatatttggctaatattagagttaaataaaatgcctgtgtataatgcaggtagcttcctatggaacacgctttatttttccagtatgcttcagaacacagcttactgaaacaagaacacctaagtccttgagtgtaaggtcttaaatagttagggttattattttaggtatgtataccatgtcacattcaaggcagtatcagaaaatgaggtacatcataaaaaattaattttctgcagcgtatttctataagtgcctaaactaaatcactttatagggggaaggggagctttcaaaatatattatgtaagtccctgtcttcttagagttcatgggttaatacgtccttagtgattcaaagtcattataaccattaattattatggtgtgtacagtatgctgtaatacaggatgcactcagaaactcggcaggtgtggttggctctttgcccctatgctaaatggctccatgctgccatactttttgagttcttaggtctaactttttatcattttttaaatctcttccttcaatatttattgtctctctttgcgcctatgagcacaagtctctgttgtgcttccaaaatatctccggtatactggaagttcagacatcaaggttgtcagaattatgtcttacataagagaaaaaagcctcggagtaaatatcaaagggatgctttttaaagcacatatacaaacttttggttcttggagttttagtggtatctctgctgatctttgtttctttcttttcttttttcttttctgttttttcggcttctgtcttccatttatttcacaaggctttcatgtgagagatgtctgattgaaaagtattatagcaattgtttatacttctgagatagcagttctaatttagtatttctttagataaccacttgccttactggaaactgcttaccttctactagtgttagttacaatttttggtgcatagtcaagaataggactttttccttttaactatctttttcaaacatttcacgtagtgcctcacccaaagtctgctccgagaaaatatatgatgattaactgagatttaaaaataattatcacacacaagctacatacaaatgaaactttctacaaagtatactggtctttcatgttctagaaaatgcttctgtgcttttcacatcttggtttaaaaaaaacaacaacaagaaagaccaagttgagcataaatgataaaaataatttgtaaaggagctgaaaatagaactcttcgtagataccaattccaagtacattgcagctttcctatgggattattttgttgctggaagaatttgtagctcctaattaggagccctttaattcattcattcgttccaacaatagcatttactgaatgcttgctgggccccaccagggatacacaggcatatcagacacaatctcaggaaacagacattttggccagaatttgaaggttgctgtgagtcagagcccagctgccatatgttagaagcattcctccagttaaaactgaaagctttaaagtgaagcttaacttgttttttcaagctagccttgattcaattagaacgatcccaaatatttcgtgttctgggaagaaatctggagaagtggtgtcataatgttttcctgttcgctgacaagtcattcagtagccctgtccaagatcatttaaaatagcctgggaataatcagaagtgatgtgcctctgcggaaaacacttggaggatgtctgtcggcaaatgatgttttaaaccctaggtttgatttagaactgttgtcaggttcctaatgacgatttatatgtttaaaaaacgtcatctccagaaaagttaatataaatgtaagttaggaaacaatgaaagtttcatataatataatcattatttactctgtggttttacttatctgttttgctttgtaatcaaatatacaaacttaccttctctccctccctgctattagcttgctttgtcagtgagtcatcatgttttgcctctattaaagaccaataatcttaaatcgtatcattaatcatatctgatcatcgtaattttgtaagaaaaccatctgtataaattttgagtgaagtaaccttatgcattgtttacgtagtttcttttccactatagtttaacatttagattatgttgttagccttagttgtatgcgggaagattgacataattttattaaaattattggtttttattgccttgaaatcctaagggatacaataggttttggtaagaaagcatttcagacagaatcataataagcttcttaactaaatgtccttgtttgtctaggagtgtttgaaagaaaaaaaaatcttgtttccagagagtacaaactctaactacattacgaagaattgcttttaaacattcaggaatttttttttttgaaatggagtagacaaattatcagttttcatggtgacatgtacatagtatatcgtgtgtagaacctttgactctgaagaacatagctaggttgacagaataacaaaagatccacttctaaagtgaaaaattatcttaattatttgggagctctgagtatataatgccaaatacatggagagttagcactatctgtatgtccaaataaactccctgttcacactgtttgttagtatattttatattgctcatacagttataaatgtctagtggtaggtcataaaccactccaatccagtgattattgggtatcaacagtgtgccagatactaatgggtttcatgtttattgcctgacttttaagatcttaaaaacatctctaaagataggtgttagtttttcagttgtacaggagaggaaattgaagctcaaagaatataagtaacttgtcaccaatcacaaagccactgttggaactagaatggaaaaccagattttccaactccaattccagtgctttttcttccatacatgctactttcaaagaagtattcactgattcaacaaatatttactcaacatctatgtatgccaggcactatggtaagccttaatgatataaggaatacaatggcgagtaagacaggtatgtttcctgactctagtgtggagagtctaaagaagaaggcagaaaagataataaatgatttgaaaagagagtgacgaatcaggtttacaaaaagagaagaacaagatgtctatagggcagtgacatttaaacttagaccatagaatggcaaaaaaagcagataaacaaggtcagtccattcgcattactggaggattttgtgtttacaaatttgcatactcactaaaatttatttataaccccaaaatcaacactgggtatgcggtcattggcagacaagtatgtgcacacagcgtcctagaacaggttccccactgaggtccattgaggtgatgttctgccctcttgtttcagctgtcatattataaacaggtgtcctttttaaagtctattcaatgccatatttttctaatgttcgtgcttttttttttttttttttttttgagacagagtctcgctctgtcacccaggctggagtgcagtggtgcgatctcggctctctgcaacctacgcctcccagggtcaagcgattctcctgcctcagcctcctgcgtagattacaggcacgcaccaccatgcccggctaatttcttttgtattttcagtagagacggggtttcaccatgttggccgggctggtctcaaactcccgacctcaggtgatccacccacctcagcctcccaaagtgctgggattacaggcgtgagccaccatgccccgccctgtttgtgctttttgttgataagtctcactgtttaaaatgatccccaagcacagtgcttgctgaagtgctgtctagtgttcaagcgcgagaagattgtgatatgtcttaatggagaaaatacaatgtgttacataagctgtctctagccatgagttatactgctgttggctgccagtgcaatgttattgaatcaacaatacatactaaataagatgtctttaaacagaaacacacataaaacaaagttaggtattgatcagttgacaaaaaagttatgagcacagactcacagaaacttaaccctctatttcctctaggacgaataattttgtcttttaaaattcagtgttcctgggaactttatagaacttaactactttgaagaactaaaatcagcaatgaatggataaatattcaacaacaccatgtgctggagaggatatggagcaactggaactctcatacattgctgataggaatgcaaaatggcacagctactctggaaaccatcaagcatttcttataattaaatgtatatatccatcccatatgatctaacagtcccattcctaggtatttaccaatataaatgtaaatttaggttcacaccacagcctgtaccatgaatatttataccagctttatttttgattgccataaaatggaaacaacccaactgtccttcaattgaggaatgaataaacaaactgtggaatggaatattactcaacaataaaacagagcaaattattgtactcaacaacacgggatgaatctcaaatgctttatgctaagtagaagaaaccagtcaacaggctgcataatatactattccactgaaataatattctttaaaggcaaagctgtagggacacaaaacatctctggttgccaggatttggggtggagggttggctataaaggggcacagaggaatattgggggagaggggaatagaactgttctgtgtcttttaatttaattgtggttaaacaattaaatgccttagtcacaactcaaagaactgtatcctaaaaagggtgagttttccaacatgtaaattatattttaataagattaaaaagctgagatctgaaagacgaatcaaagtgcaattcttctagtttgacacggtgacatcagaaaataccattaaaatagagagcactctatatgttttacagtagttctagttgataaaatactgttagtgtaaaataaccactatgtagtaatttatgttatactgcaaactgagcagcgatctctctgaacatataaaacatgttttcttttctcttgttttgttacgcctaaatctaacatggtgacaggaaacagtttcttactagttttttgacaagtgctgaaatctgcaaatcataatatgattccaatatatgcattattcataagaggacaaaacttttgtttgatttggattacccagtttaatggcagctgaccttgggataatataacaaacaagacaacagagcaaatatgataatatcacttatcttgcttgaatatgattatttaatgataggcaactgtcagaaacagacagttaactgttcgtgtccttggaagcagagagacttaccaaatgccctctttgagtgtcttgaactctgatatttcccttttttattcttccctgtttataatggctttgctacattacctctgttatatttcaaggagcaaagatgttgtaaatcaaatcaccgttacattctggtctatgaaagtcagtttcaccatataacatgtacctaacctttgaaataatgggcgagttgggctttccaagactattacgtacttaaggctttacaacaaattcaataatgcatatcagtagtttctcaataatgtatactgtagctaacacaaacaagtcactctttctcacttttattatattttgaaaattattttactaatattttacttaagatgtgttgtcaaaacatcccagggctatgtatgtactgtgttcttttataaataacaagactatgcataactacagtcacttaataaacgtagataacagtttactcaaagtacattgaaaataaatggctctgcttaagattattaagctatcaaagccatttgttgggtgattaaagtaggtgaacaaactgctatattatatatgttgcaaaaactgtgaaaagagcagcagtgaaacaatttggaaaagtaaaaacagtaaatatatcttgtgctttttctgtagaatatcatgaactatgaaatcattatttttttacctttttaacagatgtttttggtttggagtcttttaggaacgtcagctttgatttgtgtattttttagtttccttgtaatcctatctaacatccattaacaacatttagagttgtttgattattccgaaatacaaaataaacttccctcaagagttaatttggtatgtagcaagtgtttcttaaatgtacaaatggcaacattgttttccaacagaataattacaaccatgtacagtatgtttcctcattagtagtaattaaataatttactacattgtgcaataattcataatgacacatgctaaccttgctcaattatagaagccagtgataaaagaatttcttgcacacatgcctagatgttatgagggtagtacttcttgatttctggagaagtcagcttgctatttttgaaatactaagtaatgctgaattgaaggaaaaattaattcaatttttgagagttgcagcataatgtttaggagtgcacatgctagaatcagtgtacctggatttttttcttatggttccaccggttattggccctgtcctcctggacaagtcacttaatttctctgtgccccagtttcctcatctgtaaaatgaatgtaataaaagtacagaatgtttttccataaatgaaatgatttttaaaaagagcataaaatcaatgcttgccacacaggaagttccaaggaatagttaaccagtaggagaggtagtagcagcaacagtaacagtattatataatgattggaaacccattttgatttcacaaaattatttttgaggacacaaggctttactagatactaaaaatctaacaggaattttggaacttctgactggaatgcctaatttaatctacctccatcttacaaaatgtaggaagagattttaagagaagagtgattttttaaaatgtggatctaacatattgagaaaattttaacctttttattaaaacaaaaaatacccaaatctattcttgttttagcgctcacaacagacttccacagtgtaggactggacataaataatagatggacttctgagagcagagaatagacttctggtcagacactgtcagcccagatgaatcccatcctataagctggagcttaaatgtgagcatcaaaaccactattgacatgtggcacaactgtctgaaatgtcaatagttataaaatgagtatttcataatgcagaataattgattactttgcttgactgaacaggaacatattttccctgtgaaagcaaaataatgccagcatttgctcctggaacgctcctagctgcgagatttggatttcccaatgaagcccacgttactctgcagtccttgatcatgcatgacaaaaatagggaaaaccatctgtaaccgcttatcttttctccattatttgaaaatatatttttaagatagttctttaaaaaataaaatatggcctatatatgaagcatctatattaatagaactgtctcagataattttcagaactgaaatggatgagatacaaaatcaaataacattccatttatcttgttcatcctaaaatgctctgcttagcttttcactctgatgaaataacatccatttccagttttattcttccttggtgtgctgtgatgtggaactcttttgctctatgtgttttattaagtgtaatttaactttatgactatcaaaccaacgattaatccttacaataagactatgaaataggcaagctgcaaagagatttattttctgaagcacaattcccttcttctacctccaattattttttcaaaaatcattctctgaaagtgtatagtttgcagagctctgtcctgggcactgtgagggaaggcagaagaaatagctacaacctacattctgggctttctccccttcttatctgtgtgtattttatctctggtaaatgctcgttattagtttccttgagtgagaaatgcattttctgtctcgtacttttacaactgtgttcttttattttctttacttttttaagacagagtcttgctctgtcgcccaggctggagtgcagtgacacgatctcagctcactgcagcctccgcctcccggattcaagtgattctcctgcctcagcctcccaagtagctgagattacaggcacctgccaccacagctggctaatttttgtatttttagtagagatggggtttcgccatgttggccaggctggtctcaatctcctgacctcaggtgatctgcccaccttggcctcccaaagtgctgggattacaggcgtgagccacagcacccagcctgtacttttacaactgtgttctatcgtccttctaagaggctcttcatttttacttctatccaccaagatgtgatttggccttcaaggtctagctcaaatatccttcatgaagtcctccttctcttaaagtttcagatgaaccccgcacatagtaaccactcttattcttgacttacatggcactttatttctggaacacttcgagtatgtgccacacattctgccttacattataagcattgcgtttattttcctactagattgcaagctccttggaggatagactgataccttgatttttgtcctttcctctcgacatactagcacagtgtaatgcacacagaaggtgtttagtcattgctcattggatgagaactttctctcctataggaaataagacataaaaagcctgctagaccacagggcctcttaggccaatggacaatttaattcttatccatctttgtgtcctcaatacttagcaggtgcttaataaatacagttgatccctgaacaatgtagggtttaaaagtgctgacccccttgtagtaaaaaatctgcatataacttttgaatcccccataacttaactactaatagcctactgttgactagaagccttgccaataaaataggcaatcaattaacatatattttgtatgttatatgtattatatattgtattcttacaataaagtaacgtagaaaaaataaaatgttatgaagaaaatcataaggaagagaaattatgcttactattcattaagtggaagtggattgtcataaaggtcttcatccttattgtcttcacagtgagtaggctgaggaggaaaaaagggttagtcttactgtctcaggggtggcagaagcggaagaaaattctcacataagtgaacctacacatgtcaaatctgtgttgttcaagggtcaactatacttgttttatatacatgacacacacacacgagtttcaaaattgtagaacgctcagcaaaagtgcatgcggagaaacatttcaacaaattttgattaagggttaacattttatgtcaggcacaggtgctgtgtgtgtaacaatgtaagggctgatggggtggtgatggcagttccacttgtaagctctactgagagatatcactttttcctttctgtatactgtttaatcctcctagtggccctacaaggctctactctccttatttgacgtatggtgaaacaaaggtttgctcaagctcatacagctagtgagtgggatgtaggttggttttgagcccaacttcatctaatgccaaagcccattccaccataccatggagttcaagcaaacaaagaaggcttcttggagaagtaagcagatacggcacagcatagagaaagggaagaaagtgttcccgaaaagtggatggggaatgattctgaaagcagtcacaggatgttcgagtggtaggggcccgttgcagtcagttcctactccatcaggctacagttgaggggcctggtgtcctgaaaggtaaaatggcttgcccgatgtgatgtagaaagctaatgacaagtgtgaaactatcctggacccaggattccagattctgagttcacttgtatttcttgtgtttgcttacatatatatatatatatgtatatatatgtatgtatatatatatatatatatatgtgtatatatatatatatatgtgtatatatatatatatatatatatgttgtgtgtgtgtgtgtgtgtgtgtgtgtgtgtgtgtgtatctcctgtaccactgccaggtataggaatggggtgaggacacagcatggggacataaaggaatggaggtccctcttggccttggtttgcatttctccccttcctgccttgactggtgtgtgtgtagtgaggcacctgccacccacctattctgtggaggttgctcagctctgtatgcctgtgaactttacccttttccttattgtggtgattacaaaacataagccagtcctctgaatttcctaataggtgtatgaaatatatggttccagaaatcccagaagccctgcaccattgtctccatttagtcaaatctttcacctccaacatcccattacactaatagccacactaatgatttgcagtcatctatcaactgttagtgagtggcacagtgctgcgcaaacatcttttcaatgggcaaccagacatgttacacctttaggaatgtttggaccgactcacggaactctacagttttcagagcacaggtcagctgatttgtgaccttctcaaaatcagggctactgtcttattcttgtttgattatccatcacagtgtcagcataatacctactcagtaagtgtggctgattatgagaaatatgtgtatgtgtgtgtgggtgggtgtgagtgtgtaaaagtgtaggtgtctcttgccacccaaatgtagtctatttcacgatatttcatgaactatgcatatgtatacatacatgcatatttcaatctacatctatattcattttaaaatcatgaataaggcagataaaccacattaatccacttgtcccgtccccctttatactcataaacagcagagttccttgtcttactgttggcttctgggtctcaccagtgttactccatttgtaagtgttcctttatgagaaactggctccttctggactcatatttaagcaaggctgtgatctcttctaggttagtttgtgatgtgtccatagcttcccaagtatccttgctttagaactctctgggtctgaccctattgtgtttataggaaacttggtcccctggctctatgtcaaccagaatggctcaactcctaaaggtcacagtgcagtggtggctaaggattccattgaatcaagctgcctaggaccacattaacctttcactgatccctttcttgttcagctataacaaaattaattgaattagcaagcagacgcacactggagagagagacgcagggcctgggtgagacaaaaccaaaatgctgtgcctcacatgcatcagcaaactttgaaatcacctttgtcctaggagccacttgcagattcgggataagtttgccagtccactggtttgtcattctccccaatagcattatatctgtgatttggggtggcaaattatgagatcagaacttgtgtggtgaaaaacaaaatatacgctcataaagtcaagtatcatttatttaaactgtaacataggaagactggcaccaatttactagtgatactaccgtctagactcctgcaaaaatgcacccatcttttcccctaggtgtttttgggaacaacttggcattagaagtgtctctctactttcttactgtgtggcagactcagtgtggaacccagcacacaggaacaccacgtggggctgtgaccatcctgggagactctgagatgagttacatgtgtttataagtatgttgtgtgccttctttttctgagattagtcaacagaaacctttgagctgcaaattaatatataacaaactcccattcctggtaaagaagtcccattctgtttaattatcttcatgtaagcaatattactttacttttttttttttttcagaacacttggtaaaaagaaaaagaaagaatatgttccttagcactgtgttctccctcagtcggtactcataagcatttatttaataaaatccaaacgattattcctacatatttattgcattttaatattttattgtatttctacttgattgtatttttttttttccttgagacagattattgctctgtcgcccaggctggagtgcagtggtgtgatctcagctcactgcaacctcaacttcctgggttcaagtaattcttatgcctcagcctcgcgagtagtagctgggattacaggcaagcaccaccacgcctggctaatttttgtatttttgtagagatggggtttcaccatgttgcccaggttggtcttgaactcctgacctcaagtgatccacccgccttgacctctcaaagtgctgggattacaggcatgagccaccatgcccggcttttacatgattgtattttaatatacagtgggtaaaagtttgtgctaaaatgtatcatttatggctccaatttggtattattgaagggagatgtcccttcaatatgggagatgttcccttttactcctgactgatttgtttggttggggccttataatgtcatagaaaatgtgcattttgagtggttaaaaaaaaaaaacagcctatagtttttactctcaaagagctttgtgttaatataaagaacagtaatataacctgggttaaaagctgaagacatttaatagaggcatgtattacaaatagcatctagctacattggaaggttaggacttcatatctgaaattctgttgctcattagttgtaggaagtgaatgaagtacatctccaaagggcaaggtcagtattacattattctggaaatgtctttgttgaataaatgtgtaaatatttcagataagtacttgagattatatttctattggggacatatctatagaatgaatgattctacttataactgcaggagcagatgtcatgttacatgttgttcccaatgactgatttcatttgaaatgatctggaaataaatactgattactagtgatgtcagattattcaccttggagtcagatgtctcacaaggcacgctagagctaatagatttggttcttttgaaaacattgttttctaaagcaggatactgttttaaagtagcattgtgaatcatccgagttgtatatctgggttcacttgcattgagtagggaagaacatacttccgaggatgcagtctccgatggttttccatcctttaacgatacaaaagaaagaaaattgtacctgggacctgcttataggatagcttggcattagtcgttagcacaagggaaatcaataaccaaatgtgaatgatggtgtcagtgtaactgaggggcgttgcctcattgggagatatagttgcatcataggaacgtggtgtgatttaatttcataattgtaaacattacagtgggtatggctgattcatttgaaactcttgtccactttgctatggctggacagctgagttaacatgggtaggtcttgggttcacatttttataatttcttttctttgtagttttttttgggggaaaaatctttaagaaaaaaagctgtattagaatgaatttatctgaaatcaaacttttataaagccatggcttgactgaaggacaacgaactttattgaccttctaaatcagagcgctgtataaatgtttggaagactcaattttgccttgaaagggggctggggagggagtgtatgaatccttgttttctacggtgctgattatttgcttgtgttttaaattgtggcccaactcaggggcaagagcaactcacttacatggagaaaaaaatatgctagaattatccttgcttaatcatcatgaatgcaacagctaatagccatctgatattttaagttgtgcgtggcaacagaccaacagaaaagcaagcagaatgaaatttcgtgaaggaaccgcaataggtacgcaaacttggcttttcagaatttttttctgttatgctcggtactatagacaccctgaccaaagttttaaacaatgcagactctgggtatgtagcatctgaaattcattgtaaagagattgacctgtaaaataataacgtcatgatttacagttccgtaaggacagtaagaagaattaagcttcaaagtttagagggaattaagtcttagtcgcatgttaaaatgtacaaagttcaccttcagaggtctttattttctgtcagaattaccacagtgtttcatttttagggtatgaaaacgatagcttttcctacttgtagatgggttctctggagagatatggaagagcctgggaatttagcggctcaaatcagctggcaactggagttcatttaggtgattcacatacaatttccggctttccttgcaggtatcagtggtcttggacgcggggaagggggttgggggggacaggtgtagaccaggaccttggttattggtataactgccaatatccaagggttgccaagggttgggtgggcggagttcccccgcccaggccgagtctctccagaaagacttcggaggagcttactccactccccggacggtcccagtggcttcgttctccacggcccagaagtgggccgtaccttccgattagagctggggcactctaggaaatgcgggtgaccgtagctccccagaccaaacctgtcttttccaccaacgagctggcgcatttatcgcccccgagtgctccggcaagccagcgggagagtggcgtcgggttgcgagcctcttgccccaccgagtgggggcagaaagtggtcagaggcgcgttccgcggggcgctgcgtgcagaaaagcgaccggcggccacaggtgatcccgaaggcgaggggaaggcgggcgcccgggcgagggcccggggcgcgggagggcaggcccggccggggtgggccagcagagccgccgctgctactcacctgcccgcgggggcggggcggggcgcggcgctggggcgcgcctgcctcccgcctcccgcctcccgcctcccgccccgggaggaagcggaggggcgcggtgtaaacagagcggcggccgtgatgtcagccggtcacatggagcctcttatggctcgggatggctctcggcgggcgggcagctgcggcagctgctgctgtggctcgggcggcggcggcgcggcggcggcagagggggctccggggtcggaccatccgctctccctgcgctctccgcaccgcggcttaaatgatgtattttgtgatcgcagcgatgaaaggtgagcccgggcgccccgccggggccgggtgggctggcggctccggggggcggggaggagggcgcgcagggggaggggtgggcgcgcctgcccgaacgcacgtactgcccggggctcggcgcgggggccctgccagggccttctgggccaccgccgcggcgccacctgagcccggccacgggatcggcctgcctccgattggggggcaaaggcgcacggggtggatccccctctgctgccccctccggctcctgtcagtctcttgggtccgcttggcaccgggcgggtctcccaaaagaaagtttgccgggagtcgccgcgcttcggaaaggaaggggagggtctgcggagttcagaggaagccggggacgcccgcggccggtccccagggcccgcacccgggacagctccggcctaggtcggggaggcgccgcggccgggcagggccgtgcgtgcgcgttgtcgcgatgtcatccccggggactggtcagcgccccaggccttgcgccctgcccctgcgtccccgagcgcctcagcggccgccggccgggcaagtgccgcaggtccgcgctgtgtcccgcgctgtgtcccgccgcggccacttccgaaagcgcgcgggccggagcgagacgggcgcctcgagcgtgccaagacgctctgggcggcccagggagccgcggcgcaccccgcttgacactttggctggtggatggaggtggggaggaactcggcagcccacgggatccgcgggcaggggcggaggttagaccgtggtgagggccgacgggcgcgggttagtcgcggccaatcctgccgggcggcccggccttccgccctcatcaggactccgtagccgggccgggggcgggaggggagggggatttggttggagggaggactggctctaggtcctctcaggtgagaaggagagaaaccgtggcaagtcagggaactttctgatgggaaagctaaagtttggaggtgttcaggaagtcgcccgtgctgccggagaaaccgagactcgctcttgggacggttgcaaacagctccggagaaactcagcccgcagcacgccgcccgccgcccgccgcccgcttgtgcgcccgcaggttcctcgccgtggataatctgcccgagctgcttcgcaggcccggccgccaggcttggggatttagagccccatctgtttgcggcggacgcggcttccctaatgcgcagcaattgtgcagacccagactgtcctgcgggtcctagccaccggtgcgggtgccaagcgcctgttaaacgtttgctagtttggggttgtgttgcaatctggaatgaaggacaccagttcggtatctgcgctgggtttactttcggatcaccgagctttgcctttcttcactagagattgggtggcatctcttttattaattattaacaggccgaaacgtactggacgttaagatgagctgcttgagatgaaatctttctatataatgtgcccacagcaaattttctcttttcccctgtggcttgaggggaatgggatttaatcatttttagaatatgtaattcatataagtaaaagagaggaaacctcccgtgatccgcgctcttaagcacttaaaattatttgggaggaaaaattattaagatttcttatcgacttcttatgttaaaaaatctattctcccccacccccccaaaaaacttttatgctagtcctgcatttcattagccctgtaagtgtgaaacgtcttaaatgccctctgcagttaaagcattttttgtctttaaattataaaattgattttgctatttggaagatgtcaatgccagtctttatccactttgtctaatatactttgtgttgattggaggaaaggcgagaggctgagacattttaaactgctttctcccctaatgaacagtaacgacccaccaaaaaaaaggaaagtacgttttaatattttgatttaaagttgatgtttcctagtacataggcttttgcttttgtaattctacaaagtgaagttccatactgtcccttgctaatagaataataagaatcacacacgctacccccacacttggagtgacctctgtctgccataaaataatagtttcatagtattgtgctttgaaaaaagtgcctcagaagtactggcaatgcaatttttctataaactcagctgcctgaaagagagagagagagagagagagagatagaggaagagggagagagaatgcatctgaacaattagaatatttcactcccaatatcataatatcctgaattttaatgggattatcttgctttggtgcaaacttaagctgaaagagaaaatagtttgtggggaagtgaggaatgctgtaaatgtttccatatcagatttagaggaaaaaactggcttagaatcttattaaatacttccctattgcttctcagttttaatagttaaattggttccatgtgtaagacagtttgtataactagatttttcgtgcaaaacagaaatactgtttacaatatagctttttggtatgtggatgcatgtggacaagggaggagagaacaagccaccataaaagaaagattctctttgttggctgatttactgatgttttttaaacatcagtaaatcaggccctttgaactcaccaaagaagaaaatccttcctctgcattagttgtcaaataagtttaggcttagtttcatgctcaaatgtaataaatcttcatttgagtaactctagtctcatccttcaattttgcttttgtttaattaacaacaaaattccaataccatttggattgcttcttgggcaaagggagagagccagctataacatttataatcgggggagcacttgttctgctcatcataaaagtgcattggccagatgtcacgcggcagcggagtactgaaaggaaatgtaagacgttcatcagtttcagtagatgatatacccctttgcttcatatgagtgctcagcctgtgtttgtgcaaatggagttataagagcacagggaggcttaaagggaatttctggcccgtagattcttcgtccggcctgattcatgtgcaaatgcaagactcctcaccactttgaaaatactgtatgtgttggtagtatgtccaactgtaataaatacgattctgtagttttgaagaacttggcctttctttctacgaaatgaaattagaattcgatctctgatctcactgtaaggacccattgcctggtatcccttcactgggatttttgtaccatttttgttacttgtgatgggaaggattgggagaaggtgatggctggatcttgaaaagagaaaacccaaatggttgccactactgagcagaatgcttatctggcaagaagggatcagttcttttaaagacaaagaggatttctgaatccatttgtccatgggaggagggagaagcctggaccctccatgaagtagagagtattttaaaagcaccattttcatgggcagcctcttgattttatatatttcaatcacgttacttgagatacaaagcagcagcatgcacaagtaaacccttttgcccacgatttgaattgagaaccatataatttatttaatgctgcccagtcatgaaataatgtaatttctaaacagaaatagtcatttagaaatatacagtatgtcatctaaaccttagctctttaatatgtagtagatacacttgtaaatatattaataattctcattagtctcctttttctcctatctttccctcccactcaagtgagacacaataaaagtggatgagatcagcaaggtgataattgcaaagcacctacaatagcacccaaccactttcttatttgctctggggtatctaggaaaataatatttataaatggccacttactggagaaaagttactggatggatggatggatggatggatggatggatgaatagatttgcagaggtagatgtagggttcagttttcttaaaaatctcttaaattattatagggatcaacaaaaccccttatgtggaacaaatttcctaagaatactctgtcatggaaatgttttctgcattcatttttactatttacagcacttattagtaagaaatcaaggctgcctttatgtatttcatatttaataattttaaagccataattagacactcagagtcagcagctacaccacttttatgtttctctacttaaaaaacagtttttttggagccatccaccagtgacaagtcaggtgtgaattgacatttgatagtatctcaaagaccacatacagaccctctgaggaatgatttacaagttctgtctcccccatctagctattctactgaagataactcccttccatcccaaccttttgattcatgaactgagagagtcgtagtcagagctttttctatccgtcagtattttgtgtgacatgatagaacatgatttttctgttaattgtcaagagataggaggtctaaatagatggataatagcatatactatccaatgggcaaaatgcaaggaagcagctgaaatcttttgtttctggattttctttttggaatgaaatttgttagccctcatcatattttcaggagataatacgataactttaaaaatctttgctcctgtgggtataaaaaataatgtcaagattattccctaggttttccagttatttcattttttaaaatgttactgcttctgaagtttactaggcatttcataaacaaatagggagatgatgctaatctatatttattttgtgctttatggtttacaaacactcttacatcatttaatcctccatagagagtcactgatagtcccatcagtgactgatgaagaaactgaggctcacagaggttgcgttatagcctagcttttccatctgataacgtgaaacaagaactacaaccctaatttctatcttcatgcctcccctggaggaagctgtgaaaaacgtcctggatataactttgtctctagttagtggaaattataactctggcatttatatgggaaaaaaatagatccaattatgtaatgctttgctgagcctaatatctttaaattactatttaataaaatcagtttggtacaaatggggttattcttatttgcttatcattagctctcttcaaccatgattttcattaagtctgcttgttttaagaggatatgagtgaaatataagcattattttccccaagaatacagaataccatgaagtacagctaacctgtgtaaccaatcgccattatgatagaattgagagatatatctatatgttccacttatccttaggcaaagggaacattcacaaatgcatcttctaattttaatatgactttgtgtagtataaagcttacgaattctcgtgcttgtgagtgctgtcgtgtttgttttcatgacagcttaggggcatgattgtagatctattcttgagaaatcgtttgtcttttagaaaatcacgtgaagtctaaaagttttcaagtagatctgaaaaatctcatttctcacttagtggggaatggccttaatgactgctggattaaggtgtgtttgtctgaaagcaaataaggattatttcagtctcagacgaaacctttaaagtcactcagatgaatgtctcactgggatttggaccctgcccacaatatttctgccaagtagttatctggttatgctggaacacctccaacgatggggaactcactatctttaaaggtaggttactccatcttgaattagaaaagtctttttatatcaagcataactctctcctttgtacttttaatcccttaattctgatcctttcctttggggctgtgcagaacacatttaatccatctttcaaatgaaagactgtaagtcatttgaagactagtactgtaacacacacatgcacacgcacacacacacacacacccctctaatacgtaatatctgctgtccctctccagtcctttttgctgtaagtgtggttctgccttcccacaatcttggtcagtttcttcctcaaacacacttcagtttgcctagaaccacttgaaattttaatgccaaagatggaccccaagtgccagttgtgatataattgacttggcacttaacccagcacatagtaaagaggcagccatgacttaaagatgaaaaacttttgttttaaaattttaaagataacatcagctagctgtatctctagcacctctcaccaccagtctttgtgatatcattgtttgtgaaagtggacttttgaactgtttaggaatacttttagttccatttgaagttgattattaagtatccaggaaaatcaaagatactacaaaaataattaaaggaacattagaagcatttcaggtatttttctgccgcatgtcagatatgagataaggctgccctctagtggttacttgcacatggacggctaaacccataatggtgccagtgaatttcccatcaggctagtgggaaggtcaaaggttgtagttattttcttaattggaatgagacatttctattccagattcaaaagtttaactcgttgttcttcatggttatcagaaatgtaactgtggaagggatactgaattttaaaagtttgcttggcaggaagtaaaggaaaaaaaatttttaacttaaagctgatttatttgctgtttggctcaatattaaatttaagtgaaatttggtttgtgagtcaacaattgttatgacatttttagtaatcctcgtatttttttaagtttcaaactccattctaattcccaacccttgaatatcttttaaaaagaggtcgtcatttgatgagctaaattcagcgtttcccctttttaaatctagagcttttctttttcaaaaatgataaacatttagtaaaaaagtaaactacagtagcttttggggggtaataaaacaattttaaacatggatgaaaaaaactattaaccccttggtttctgaagatttatggttagatcatttggttcacttaagtatatacagtttgcctaaaaaataagatagaggatatgtcagaaactctgcatgaggtagcgacaagcattcatttgcatattttttaggataaatagataatacaagtggattgtggatttggattttggtgttataacaagtgtgaaacaatggtaaaacaatctgatttctgtgtcggaatctgaggaatgaatatagatcttcctatttgcttaaatgttatttgttcctggtgctacacagaggtataagaatgcacgtttatatgaattttgcattgctgaagaagtcaaagctgatctgagctagaataaccagggtaataataatgacaaataatcaccaggcttgtaaaggataatagtgcttacgtgttcctattagaaagatgaaattgcagcgtttcatgaaaaagaagaaaaaaaataaaaagcaaggaaaaactgctgtttaaacctttctatcatagaaataaggcagtggttcagaagtgaagacttgtggttaagtttcagatcagttattgaagccaaccgttttacaaactgcgccacccagaagtgtgattttttttcaccacatgagaagtattctctttttcacagaatgttattttcatttttcggttgttggaaaggttttttttctccttctttttatttgttcatctcacttcaaatcttctgtagaacagtgggtgaaaataagtaaataaatttgtttcagcaaatacttaagtgcctattgtgtgctaggtaattcaggtaccacctttgtgcttttataataggagctgagacaccttcctcccaatcaagtgtcttaagccatgaatcagcatttaaaaaatgcactgagaagttggcagccacacttagtcagagaaggctgctttatggctgttggacttacacatttgcatttgctataagctacatgccatttaaaacaaaggagatttctgtgacatgccaaacaatgcaatgaaatgttaatgtaactggataaagtcaaaccctatacttatggatgaacatgatttgcttccacataagccataagttagctctaaaatcctgcctgaaacagtggttctgaaactgtagagtagaacccatactccagagagtcttaagaaggcggatccctgggtctcacacagagtttgattctgtcagtctggggtgaggcccacgaaggcatgtatttacacagcatctcagatgtttctgatgcaactggtccttaggcctcactttgtgaagctctctgttctagcctgtcagagccaggtggaccgcagagtcctccagtcctctagtggttcccaaatgtcattgatcttcacagtcatctgggaagcatttaaaaaataaatgcctttctccagcaacacctgcacagatcctgcttccaaaagcctaggaggggaggccaaggaatcttcttttgtaaaagatcctcttgtgaggataagacaggtttgggaaccactgctcggggctaaccctttcctcttactcacgaggaaagggaatctcagaaaggtaaattatattaaggtaaccattcacttctctttagttcactcccttcagcatggaagaggtgccagatgtgagcaatttctggcattgttattaacacacttgaaatatttttctgttaactttggccttgctatcaaccagcatgcagaagcaagtgggcagactgttccctcaaatctcttaccccaagtggcccaaacaggagagaaccctgaggctgttttggtgctggaggctgctgtgagacttttcaaatactgtactccttttcgtcataaagccttgtccagaagccccagcctctgcatgtgacatagacacaatgtattttagccttcactgtgtgcctgggctgggtcttgccaatactgtgaccacttagcaggagcaggctaagagtcttactgcagaagtcaaggccaactcagtggaaacagtgatgtcttttcaaggttgctttattcagcgacaaagtaaaggtttcagtgccctggaagctgatcagtgcttcctgtttagcacatggcctttctcaggcactgagcatctggtgtgtatctgccagtgtccaggctctggaggtgacatccaaacaggggagaccaaatgctgccttcgtgcagcttagattctagtctggtgggatagatgaaagtagacttcctctggctggtgtggagaaggactacctgcctgcttccacactgcgacaccagccccctttttcttttgaaaatgctggtgtagtatctatctcattattgtggcagatgtgatgctggcggccgaggggacagcagtgatcatgtcagtctctggtctctgtgagtgtacattctggtgggagaggtaggtaatacttaagtaaacatatcaatgaactagataaatgcagataataacaacagctaggccaatgtaaaaacagtataatggtttagaaatgcttatggcctcatgggtcaacatcagggaactgaatcaaaaaattttcccaactgatggtgaacattttgcaatagacctcacaggtcatctgctcccaacctggtctgcgtattaatctatctaaagagtttttaaaagatatataagcccaggctgtgctcttacagatttctgattttactggtcccaaggtgtagagctcaagtattgctacatttttaaagataactcagataattctggttgagaaacctctgaagcccaacaccctcactttgtacatgagtcaccctgtccgcagtgtagcaaaacaatgttgagtagtggaaacccccctacatagggtgggggaagatgaagatatgggttattgtcccagatctgcgatgcaataattgtcaggttaaacctcagttgttcactttccctgtttttaaagttaaagggttggacttggtagtcaccaagatcttttccatctctaccgttctatgaaagtgtttctattaaaacagaaacatgctctagtttcttgtttgagacttgggagaggcaaacaaatgcctcctactttccttattccctgtctctacccttaattgctataggtccttctatcagctaatcagttccttttggaagtgaaaatttaagacagaaagaggtaattactttatgctatttaaataaatttaagaacaagcaagttttcattaatattaataataaatatgcccagatttagttctagtaaattacagtcataccttatttatcaaattgtagcctaaagctttttccgtttttgatggttgatttaaaaccaaggggcgggggcagttgtttaaaaatggaaaccatggagtagccttaaccattgcgtaccacagtaattttattctttaccaaatattccaagccaggaacccaaagaaattgagtctctcccaatgtatcgtctgcagtttattagcaagcagaaacaatgtatctcttgtgatgccatcttattttataaaaaagaaaaacagaactaagctccagcatgaaaaaatatcatttaacttcctaatttgagacctggcatctttaaaaacttggatttcattgaaacatttattcaaaaagacagcagttcattataaaccagcatggtgtgatgtaagcaccttaagtttatttccttgtgtggaatttcccagtggggtttgataatattcagcagtttcagaagcgataaaggagtttgaaaagaaaatctgatgggagctggtaaatgaaattagagccatatctttttcaacagagatctttaaagatttgcataccgcctattttgtatatatctaagaaattgtacctccattgcattcacagccacgtttgccctagacacaagattatgaaaaatcctcctcctcttaagttgcatccgtaacatcaagcaacttttgaaaatgatattgtttaacaaaacaattggtttgatagaaatccatttcaaaagcaatgtttctaccacaagcaaaatctcgtaaaacagaagcattttgtttccactattgcagagaaacaaagttgtttaagatgagttaagatgtctcagggttttggcagtctttctaagccccctgctgctgttacgttcagaatcccttttgaagtggcctggaagtttctatgcaatttcagtggctgcttaggggaaatattggctaaactgctcatttcgactgttaagatggatcgagtgttttcagaatgttttcgtttgctagaaatatgttttgcactggggcttctcttgttgaagaaggttggttaccagccatctgaagatgcctcagggtgtttacagaaaatgtgggtgctgtagttatatttgagcacagccctcccccaacaaagatagtgtggtaatcagcaggaatgtgaaaacatgtatttaaggattgatgcttgtaaaagaggcgctgtaaagaaacatggttgttcagatgtaagaaatgactgacagctctctttgtaggcatgctagtaacaataaagtctagaagttcaacatcaaagcgatcacagcttactccaccagtgacttgcacatcaaagagggagcacaagacaaaggaagtgcactgaggtatgtttctgcctcatagccagatcctcagggggagctcccagagctcctttcatgaatgcatagtgatttttgcagatcagcgtcttcatttcataaatgaccaggaatataaaagcagggcaaatgaacgccataattgctggcatcactttaagtttggttcggaaagattcatcacaggagcgattggtctctctggtttccttgagtagtgaattctataccagtgtgggcaactctaacttcacctaatgtagtacagggaattattcacaaaataagagaaaacaaagtggatacatttcaaattggtggattggaattatgcttgagaacataaaactggacctaagttagtgcagtatgcctcttttttctttcctgttgattgcttaattttttgagattaaccttgtgggtggatgtctgctgaatcaggtgtgcattacttaacaggtgtgtgacataatgaaatttagacctgttaaaccagctcttaattaatcaccagatctatgcttcagttctctaactcaaatcatgtgtactccaaaatgccaaaagtagaacaggaagaagagtctgggtttgactttcttccctctctcttgatattacattgaaaataaaattaaccatgcaagtattatgagtggttttaaataatgtgcttttttttttgcttgcctttgaaatttaaagttcttttatagttcatcttcagtaatttactcatttttaagtgctattgaaaaatagtagtgctctgtgtagtcattaataaatacaaagcagctttctcaaggctctagggagacctaataaacacaactgtgttactaattgatgctatactgagctgacaaaagtagtgcatcggtaaacagaagttagaaagcaagaagttaaagaactataggggattatgtagacatcaagggttgaaaattataataaggcctctttaggggagcattaatttgcatggggctgaattaggacaaccaattatttctgaggacactactaagagctcatccaaaatacccccaaagtgaaaggtttgggaaagagttgggacttaggtgagatggagggggcactgagcatgtcatatttcctataactcatggtagttcaatagttttctcaatagcatgttagaatagctagttttctttgttaggagaaaatgctgatgaaatcaacagtactgtaatttctttgttctatacacacagtttatgttgaactaccacaatggaatttttttttttaagcaggaagggcaggagagtggagacagaaataaaccttttaaatcttctttacgtgaaccccacaaggacataagcatttagcagattagagagcgtttggatttatagatactatcctctacagtagtggtcttcaatgtgtgatccagggaccccctgcggggccccaaggccctctcagaagctccaagagataaaaaccagttccataacaatactgaggcattgtttcccctttttactacggtgaccatttgtattaatggtgcaaagcattggtgggtaaaactgctggcaccttagcaggaagcaggacggtaatgccaagctgtaccagcagtcatggtattcttcattactgtgcagttgctgttaaaaaaaaaaaaaaaaaaaaaaccgggcgcggtggctcacacctgtaatcccagcactttgagaggccgaggcaggcggatcgatcacaagatcaggagatcgagaccatcttggctaacatggtgaaaccccatccctactgaaaatacaaaaaattagctgggcatggtggcgggcgcctgtagtcccagctactcaggaggctgaggcaggagaatggcttgaacctgggaggtggagcttgcagtgagccgagattgtgccacttaactccagcctgggcaacagagcgagactctgtctcaaaaaaaaaaaaaaaagtttcatttaagaatgtgcttgatgaagcagaaaaatttattaactttattaaattttgaccctcaagtccatacctttttaatgttctttatgacaaaattggaagtttgcataaagcacttctgctttatactactaagtaccatgtttgtctccagggaaaagtacttgtgtcattgtttgagttaagagctgaactagctgttttttgaatggaatgccacttaatagaataacagactataattattcagatgtggatatgtttcatatattttctcaaaaatgaactttgagtctgttatctcctgaaaaacagttcacagtatttactgcccatacattcaggcaaaaatctgaattttggaaaacttgtatccaaccccaggaatctgacagcttcccaatacttaaaaacttttctgatggtatgggtagtgatattaatcaacataattccttgatataaccacatctaataatgaaatgtgtcaaaatctggaagatatacaaaacccagtgaaccagtagtttccaagtgacccatggatgatattataaaaatatatgtaggtaaatgatccactcaaagtgcaaaatataccggtgtattttaatttaacaaagtacaaaaagtcagtgatatggcttcaggttccatattctaactaatctttaagaaactaccacttgttgagttttagtgtagtaccacagaagaatatccaaaattatctgaaaaggctattataatacctctcctttttctagctacatatctttgtgaggccagattttcttcacatacatcaaccataagagcataacacaacagattgaatgcagaagcagctatgagaatctacttgtcttcttttaatagccagatataaaaagattcacaaaaatgtaaaataatggtattcttcatgctaactttttgtcttataaaatatacttatttttatatgttaatatgcaatgtgtttattactattattttaagttgaattataagtaaattgtgtaaatgttcccagttttaacttctaatatggcaatgactgatgtataacctacaaaaacaaaagctgtttgcagcttttttttttttttttttggaaacagagtctcactctgtcacccaggctggagtacagtggcgcgatctcggcttgctgcaacctccacctcccaggttcaagtgattctcctgcctcagcctcccgagtagctgacattacagacacgcaccaccacacccggctaatttttgtatttttagtagagacagggttttaccatgttggccaggctggtctcgaactcctgacctcaggtgatccgcctgtctcagactcccaaagtactgggattacaggcgtgagccaccacaccaggcctctttgcagtttttagaagcataaaagtatacagagaccaaaaagtttgagagctcttgctctacaatttactgtaggagacatagtctgaaaattgtatgacaaagcacaaggtaacaatagaaggggctttaaattcagacagatttatcagatgagctataaattatattaaagaaagcactttcaaacatgaattcaagagcaaattttgtaatcctcgttttctttataatgtcttcatctttcataacagtggaagaccagaatctttggtgatattctattttcagagatttttgtttttgttttttttattaatatagcaaagacctgggcataaaatttgtggtttacagaggctttacagtttatctttaatcatctgcaacctatattagcaaaaatagtactagtaaatgatggctgtttttctttttgttttgggctggtgtggaggaaaaagcttttatacaattagtaccacttccagagctatcccagctcctgaaagatgtgaaacttttgtcatgaatgtaggcaccttggagaattttatcactgtgtgtagagatggaaagcccttgcaggcctgcgaccatgcaagtgatgggcaccttaacacatacaccattcactccccctcagaccttctccaagggggaagagttctgcccagatagctgtcagcacctgagtgtgacaaggaggctaagccctcgactaacagatacacttggcagaatcagttccattacactaattaaatatgtgaaagcccaaccttccctgaaatttcttgtgaaaaataacatgcagttagaaagcaatgcccaaatacttgtccttaattttataatcactttgttggcatctaacatatagacattcacattgccctttgtggctgggccatctgcctctttgttattatcaaatagggggcattcaggtcttgcattccatttggtttcctatcaaaaggctgtccattgagtgggagcaaatgtgttttggcacattctgcatttccagggtcttgcttctgactgttataactaagagagaagttggtgcccccagagccaaatcagtctcagaacactgggatacgttgctcccagcatagttttattagccagttaaagggataggctgaagcatactcactgtataaacagaggttgtgcaatggcccacagccacgctgcccatgagaaaaagcacctcctgtcttctatggatctacccaaaattaggagggctgaggagaatgagatggccccatttcagaacaactcacagtggtgatgtgggggaaggatgggagtgaagaggaaggaaagcaaggcaagccacgctctgttcttggagagggtgttgggaaggtgcagctgaggaaaccctggccgtttaaagggtgagagaaataactacatgcccattcgtggttaaaaagaaaacaaaacttctaactttccaatttgggaaacagaagtgtaagataattattctctttgaagtaaaataaaatggctcatgtttaggcattgtattttattaaacttttagcattttctggctaactgaactttaaacaataaattttataagctaagttttgcattattcggtgattttgacccaggcatggaaaactattttaaaaaaccaaagggacatttttttttcttgatctgggagtattgcctgtgaaaattcataaagcttacatttatcatttgtgtctgtttctctttgcatgttgcacttcaataaaaagcttaccaaagggcaggaggattccagtaattttttttttgtaaatcatatactctcagtactgaaaatattctctagactcgactttggaattttccactctgtcatttactaaacattttgtttattctcagttcctttgtaccaccacttcacagaggtaaactggacctatgaccttacagtagggaaactgaaggcatttatacttcaagtacacgtacaaagctgtaactccgtatcatgaaggccaagtatcagcctttacaggattgttttcttgctttatagccattggcttttgaatgacctgctagtcaaatgggaaggaaaaagtgaatcagacgatgtggtgacgttgctataggaataggaaggtcttctaagacttaatactgtctgtgtacattctagctctttgctgaaggttctggccctaggttaaggctggcattagacaaacggagctatgttttcaaactttatcatctcctctcttagggctctcggtggccttctggtttagctgaaggcagagttgcctaatcaccacataaaaaatcgagtagtacaatctccagacctcctcttcttctcctgcccctgactcagtagtttgatcttctgtcccgttctctcctggctcttccgggtgacacaagatacagaaataagaaagactctcagaaagttggcataggcataagagcaagcatggatctggaaatttttccaaatataaggcttaagtcccagaaatgccacgtattagctgatggatcttgggcaagtcatgtaacctcactaaacctcagttttatcatctatcaaataaagatgataataacatctacctcatagggatttttgggaagaaggaagtaacacatggaaggtacttaatgcaatgtctcacatgtgacaagcacttagcatatggcaggcactgaagaagtgttgttattaacatccccatcctctcatcctcttgtacacgtggtaaatggtacacatcacgtattcaagtttgaagttagggtaatgagttcatccagccttagccggtacacattgcattttaacaggggcctttgccagtgcccaagcatatgagttatgtggtctggtcagatgggggctgatggaagaagaacttgcatgaaatttctcatcatataacataagaggcttctaattctgcattttccaagccctgctatttgtaaccagtaatatatgttctaagcctatcatttataaagcgcttcctgtgtgccaagcaccatgaaatggattaccacatttaatacttacattagcctttcatcctcctttttacagaggaggaagcggagactcagagacgcagagcaacctgtctaggatcacagggctagcacatagctccaattgggggctgagtctgccagactcgcagggctgggctaaccctgctctgttctgacccaacagccccagcaccaccggagtctcagaaactcacattgttccagattccgagattaggtcatcatgcaaattgaggttaggggctttttctgaacactgcagtagaatggaagtagacaaaatacacatagaaatggattgagcatctgatgtgtgccaggcactataaaaagtgctggaaccagaaagatgaaaagaagtggtccctgccttcaaggagctcacaggccagggagggcccaaggtggaaataaaatcatgacatagtgtaaatgctagagcagaggaatgcaggagacgataggagcacagaggaggagcacaaatcagactgaggggttaggaacagctttttggaagaagtgaaggcttagctgagctttgaagcaaaggaaggttattgccaacaaatggtagtttgtgaaaatccttgaaagctagacagtgagcaaggcaagtcggggactgcaggagacaaggcatgtagaggagaccggtggggtctgaactatgacaggctctcaccctcattctacgggagttgttctttctactgaaggtgccgggaggccacggagggaggctgccagatatttttaaggcacatgaagaaacacgagaaacaatcagatattctcagtatcttcctttcccttaattatttcaagagataaaaaagctttttggatgcggcaaaggtctcttctgtgttatgatttgggtttctgtgcggccgctctgcctcttgtatggtgttgagagatgtatgaaaggcatccgccacgagtcttcaatggatttctgcactttgcttgatataaattgattcagggacttcattatgatgtcgctaagatgaatggggcagtagtgttttggcttaacgctgccagaaggagggaaaacaagtttctgtggtgccgcggttcaatcatgctgcttacagaagtagggccatgaaaggacggaggattgtgtctttgatactagaaaccctgtagccctgttggtgctacaagcgaatgcttaaattaaaggttggagccagctttcaagtattgactatcgagcaaaaagctcagcccacactcatgtacttactcagccttgttaaaataaaaatacactctcggctgagctcgtgtcacagccagtgtaattattacattaaagattgttgtttgaattagagttgctgtggtacacgtttatttaaagatatgcttggtaatttagtacatgttagtcaggactcatgcccaaactgtgaagaagtattcgttgccagctgcctctcaggttgtttttgtattcaaggtaaacacttgaaacttgacaaattgatccagaatagtggtgatctgacttccttgccacaggaccagtggcttaactcactcagctctcatctcctacccaggatgaaaacagcatcaaccacattggattattttgaggttgttaaatgaggtaatacatttcaggtggttggcccatcaataagcgcttcttcctaaatatagttttgttatctatattatgtatagatttgtttttaaatggtaggagggagtatgactaaaaagcccctcttttttttttcttgctaccaatggtaaaagccggatgatccagttgtctataatagccatgcatttattaaaccctgtgggttataacccctctgtttcttatggttcactatgcccagagcattcaagtgtttagtaaagttgtgaaaggctttgcaaatatgagggatgatgcccattttctggtaggtttcttatggggttctttcccccaacatacacatttctcagtgattgtcccctctttgccctttgctggccatgtgaaatgcaggaccacatcttctccaacagatgaatccacattaaagccactcactgacctgctttctacatttaaagctactcaactttgctatgtaattgtaaggctcccaaattcaaagcatggctagtgagcaatggatgagggtatacctagtattttttccatagacttatggaatctcatgcatggaatttagatatcaggcctccctgtcctcatctgggagtgctgggattcatgagctactcctatgtgctctgcagtacgttctggtgtgtttaaggtaaggtattattctgtttacataaatcaccctgacatcttgtactttttcatggattattacttttttaatgaggtaacagaaatgcagtgaggtcaatttatgtgttggcctaacattctaaaaagtgaattttgataacttcccagcaggaaagaaaattttcatcgtagaaggtgacatagctaaatacaacagtcccatagctagctgggcattttatagactattagacctgcaagagaccttagcagtcatctagtgcaatctgctaactttataatcgggtggttgggagattaaacaccatgccaggataagttagtggcagggactaaaatcagggacccctcatgcctcttcatgatctttccatagttcatgcttcatctaagactgccacagagagctcagatgtaatattatgataccaaaaagtgctgtaagtgatgtcttaggcctctttaactcttttaaaaactaggctattcatttctatcaaaaggtttaattggcctgcacaattatttgtgttttcacagaaaagagaaaaaactaattctagttaagagtaacagcacacagtaggactcatatgcactggagctttaatttagtctttacaggcacacacacacacacaaaaacacaggaaaccacttcaaatataccattacgatgaattcaaactgtgtcagggacatcagcaaaacagtgtcccttcatgctgagtattgtgaaaatgtatccttgttgtttgctgtggtctcctgtgggaggcacatcgaaattactacactccccgggaaaaaaaaaatagcaagaacagtaaataacagccttcagataatacagatgggtaaacatttccagaattgattatagaaactactgttgacaagccactagcaggcaaaatgaggagagaaaaaaaaagaacttttatctgccattcaacactgggcatacaaggcaggatacagacagggcaaaatagccgattaatatggtaatgtactttattgcacatgtaggatcatgagagaggcctgagagttacctggtccaagccactcctgttaccccagagaaaacagaaactcggaaaggttaagtggctgcccagcatcacacacttagcagcaaagccaattttggaaccttagtctcttgactctcagtctagtgctccaactactgtactgtgaccctctaattgaatctatgacggcacctgtgtcaggggtacaagatgaggctcatggaaatttatccaaatgaatagctgttttaaaatcatcattaaaactgtccatgggccaggcgcagtagctcacacctgtaatcgcagcactttgggaggccaaggtgggcagatttcctaagcccaggagttcaagaccatcatgggcaacatggtgaaacactgtctctacaaaaaacacaaaataatgatgataataataataataaactgggtatggtggcacgcattatagtcccagctactcaggagactgaggtaggaggataacccgaggctggggaagtcaagtctgcagtgagctgtgatcataccactaccctccagcctgggtgacagagcaagacctcgtctgaaaaacaaacacatacacccacacaaaacaaaaataatactgtccatggttttaagcattctcctgaagacaaaaacttgttaatacggtaccatataaaatctcagtttatcttcacatccagaaaggaaggcatttttcatgcacatttagttactcaacaaatatttatgaagtgcccgggctgtgtttgtgttactgatggcccgtgatcggctatcttctctcttgtctcggagtcaaataagcagggggattgttggatctgtccccttcacctcccttctgtcgaaggatctcacgctcacattgtcttacttttctctcgtttttcctatccttttaatctgatctttaaatgtcagtctctgttctcatcttcctttttaacgagtgtgggtttctcatgtttatcttgctctccttttgctgacgtatttgcatcactttagctgcagttaatatctgctaaatcaaaccatattggcttgaatagcttccattgatttgtgaataaaagaatgcttcagctgcttggccctgctctctgtacgttctttgtcgccagtaggtttaacttactcaaaaccttccttgtctgcatccctcttttacccttgtattgttcatcctcccctgttcaagccattcacccttttgagctgtcgttactgtaagggagtgactgctatttcatttactcattatttactgaatgaggagactaattgtcatttttctttgctgttgccctgtttcccccttttaaccaccacccttccgcccctttatggtgaggaccaaaatcactgttgtcattagctagcctgtattgagcatctactacatatttactaagcatcattcagaagacttgaattttgtaaaaatgaatcctttgggttttttcttttctttttctttttaaagagacagggtctcacaggctggagtgcagtgttgccatcatagctcactgtaacctggaactcctaggctcaagtgatccttctgcctcagcctcgccagtagctggggctacaggcatgtgacaccacacatggctttttttttttttttttttttaattttttaaagagatggagtctctccatgtggcctaggctagtctcgaactcttaggttcaagcagtcctcccacctcagtggtttcttttgagaaggagtgcaaaatgaacaaggcactttcgttgattaatttaattcaaccaattttctatatataatacctcttaccacaaagaaatgattagattctaaatgccagaagatagaggtgtgaaaagacactaaccacaaaaaggccttttgtaaattgtattgtcagcgtattttaaactccaggaaatgccataatattgagtttttttttttttttttttagcgcaaaaccatctaaactgaaatccatatgaaaaatatcaaaactattcagtcaacttttacctacttcactttgtcatcaacaactccctgttccgtccttgcaaagcaactaatcttttttacttgtactaggaaaacatataaaaccatcctgacagtttgataatacaacaacagtgcttagattcaagataaatgtatattacaagaaaagtgaaagaagctctcaggtgagtgagctctgggtcaaggcccttcgagccaaaggagaggaggtcctggactttggtctgatgtgttccaggatctgtgcctggcctgcttcctgcctcccatagcagcagcaagtcctgctttccccagtgagatctcgactagacttccccagtgccttgtcagagaaaaggggcttcttccttccttagaatcattctgacaccacactgagccggggtatgcaaacagggaggtttgggtcttgagaatagatcatgcaaatttctttcttgtttcccttaactacatcagcagtagagagcagagaaagccttcactgccatgctgcctcatggaggtgctgaagtttctcccaggtaggagaggactttgggcttcttttggcatcactaccctcaggatgcctggctgttccacctttctgtgggtggggcaacccttgtctctggcagaacagaaaggtgcacaggggcagaggtaacagcaggagacataagcattgtcctatccattttccagcagagcaccactgtcctatccagagcttattttcctggaaaccattctctccataaaacagtggttctcaactgggggcacttttgacccccagggaacatttatcagtgtctagagagattttttgattaatacaattcgagagtgctattagcatctagccacaacaaagaattatctcacacaaaatgtcagtagtgccaaggctgagaaaccctgccacagagcatgctttctaccttctgttcatcataggccccttacatatgacatcttcattttcattttcaacccaaacacattttatttaacaccgtataacttcaattttaagtaaaggaataaatggaaaactttattggcatgagaaagaaaaaaagggaaagtaatgcattaccaaaagaagccggagataatcagtatgtatgaactcatgcaatggtagaattattcttgctaataaaagagggtatcggctgggcctggtggctcacacctgtaatccctgcactttgagaggccaaggcaggcggatcacttaaggccaagagttccagaccagcctggccaacatggtaaaaccctgtctccactaaaaatacaaaaattagttgggtgtggtggtgcatgcctgtagtcccagctattcgggaggctgaggcaggagaatcacttgaacctgggagatggaggttgcatgagctgagatcacaccactgcacgccagcctgggtaacagaccaagactcagtctcagaaaaaaaaaaataataataataataataataatgataataaaagagggcatctctctaaaagaaaaggtgcaaacccaaacatttagtgcccctaggcaggtggtgtgagtgtggcaggtagaggaggcacttggaccgctggacggcacatatgctttggaaagggagcacctcccttggctctgtcgccgtttggaataactggtctgtcatcaccaggtcttttttttttttttaagagaatctataaatctgaactttaatgtgaaattccctggttattaatggctagaaacatattttaaaaactcataggctagctcgttatggaagcagattaatggttttggctagttcatctttgttagtatctttatcattattgagattgtgtggttgaacattggacagatgagctctcacacgtaatctaaacagactcctttctgttctgaaggcttaagtcacctagaaaataagtccaaactccttaacagagtattcaaggccctttaggattaggtcccgccaacctggctacccactttccatccttatattgagccatttgctccactctaccctgcccttgagacacagtgagcctctctttgaacacatcacgcatgttcatgctgggacctctccttggcttttcttcactcccatcgcaactttcactgcctagggaagtgcgatattcattctctgtggcccaaatcaaatgacaaataatcttcccgaattccctaaaagaaatctggtttggtatattctgttattatgatctttataagttgctaccatgtattcatctagtcatctccccaacctcaagtaatgtgtaagacttggaggctaggaacccaactttattgggaagccaactttattgctctatttttcatataaacctagctttcagtaaatttaaatcaccttctgcttatccatccaccagtatgcactgtgattaattaacaaggcagtttctgcattaacaccaaactttccctcttccctgcctatgaccaagttttcaaaaaaaattaaaataacattaaaatgttattaacggcaaaagggaattattttttgaaacatctatgattttttactaagaaaaaggaaaacttgagtgatgagtaatacttattaaacatttggaatagcattaaaataagtatttttacagagttaaatatttgcgtctatacttagatgtataaaatactattctttgaacttgaagtggattttgaactctgctctccataattataataatcataagcttatttatgtataggtgggctatatagacattaaccaattaatcttgatcacatcacctaataggaagactttccttgataccctatttttagagtgcacatatgagtgtatgttaattataggtctctgttattaactttgcattatattaccgaaatgcttaattaacagtttaccagcatcaagagtgtaggtgggcaagaaacttgtatcagaattcacttctgttcaagccaggaggtgagtgacattcataaatccgtcaaatacctggccttgcatccaaggactattcattttccttaagtgtttaagtggttctttgagaggatgtgttgactttatcaattcaggccacatcataattagctaatttaaagaaaaaacaggggtggtatctatatatgtttgtaccaaattgagttttaatataatcctggttctctgagggtgatatggctaataattaagttatccccattaggttatactttcggaagctgctgttgcctgctgcctattccattaaaaactaactttatcactaattttaacatgaaacagatccatttggagaaaaatccattatgaatgagacagagttggctgttgaataacattggtgtaggctcaagtctggaataaatgtgatatagatgggacgatattggacaaatgcaatttatttcattattcagcaacaaggtattccaaatgtctctgctaatgaatacatgaaaacagattacatataatgtgcacactgtgagtcgcatttgcagaattatttttgccacctctagcactatctgaaaccaacactgaatagcaatggtacttgagcttctagttgcaagaaaaagcaactttaaaaattaaaaccaaaaaatgtaaaaagaaaaaagtaaatgtcttatctgtggaatttacctttatgggagaattcttgggaatatagcagttttatctcaatccaattgtgttgtcctctgttaaacctctattgtcccttaaaatcagcccacatgaaaagaagacagtgttcttcttcaaagctctgatggacgactttagagactgtttcaggaacactctgtctttttgctgagatattggtagaatacaatagataacatttaccgagctcacaagggggtcactgcttgtccacagcagtttgtaagctgttggttctggcattaaatttaaagtcccacaaagtgaagcaaaaatgtataataatgctattattgtactggttgcagggttttcgttcgggtgccattggggtattgagatatttaaatatcaatacttttatgctgtcatataattgtcttagaataatcactgttttgcgctgataaaatacttttaatctagggttttctcagattccctatcccccaaatatatctgagtgataaacttgttgaaagttcaacatgtcaaggatgacttgctctagcaagctgtagtcttcccaggcccccacctttcctggttaaaggattgtcctgatgagaccaaaagatcagatttaatatagcccagcagacttagaacacaggaaaatagtcttttgtcaccctcagtttacccctatccctagtcagctctctcataagtgaagttaaaagcaactagatgagagtgtggatcattctgaccaaatggttctcactggcagtaaaaaatggttccaaaagatgatcttatttggtgggccaaatgtaaagagcattatgttaagataaaatcagtaacaattgcattataagatgccatttattgcatttttttctctatgccaaacactgggctaaacactgaacaagcatgatcacttttaactttcaacaactctggggataacccataatggggataaccattctacagatgaggggaactgagaatcaaaaaggttaaaatttttgcataagttcacacagaagtgtgagctgggatttgaatttaggtgtctcatcccagagcttctcaacatgtctccacagccgtgctgtataccaattgtaagcatgcatctttctcagactttggattcattatctggatataaaattcatatcctaataaaatgaagtatgtagtgagaagtgtgctcaagtcaagcagcccatgaaaggctgtacaatagagggcaaagtgaaagccgcatgcaggtctgtggaattgtatggggatgtttcatacaacactgaatgccatgtctgctggaaaacattgcttgaaaataaatatgtaggccatcgctacctgtgtgtgtacttgctgtaatggagcaaacttccaatgaccaccaagaatgaaccacagtgaactagaagatgtgtcctctgataaacaatgtctgtgatgtagccacacaggaaaagccatggtttgaagctctggggagcccgtttcctaagagactctctggggcacaacaataagagctgctgtttactgagagtctcctgtcccccaagcactgtgctgtctcagtttggttttaggtgggtaagatccccatgctacaaatgaagaaactgaggctcaaagaaatttccctaagattgaccacatccgtggcagaattggaacagtaagtgttcttgatgactaaaatagttggaaatatacataaggggtaaaatctcatgaaggttccctaattaaattcacaaggtagactttgctttgaagtgaagtgagataccttctaaagcaaaagtctgtttaatattttccaccattagaaaaaatgcgtgcttaggccaaagtgcaagaagaggaattccatgtggaaaactgcaggtgtgtctagttaggccaagaggtataaaaggctgagcagttgtctggcacacctggtatttgcaccatcagcatcttgcacttagtggatgctaagcaaatatttgtgatttttttcaatagcagggatgtttgtctgaatatttaaatattcaccttagtttgattttactttggtagactgactccgtgttcactttgggagaatttcaacttatacgtgtccgccttaagtaacaagattcagaaaatatgattaagtatagcatttatttgagcccaaacttgaggatagccacctgggagaatagattgaagttgccttgtacactcggattaacagcagttacaagtgaatttttaaaggaagaaataagaggcagtttctaaattgtttaccaagaatttatatttaaataacataagctattggccaggcatggtggctcatgcctgtaatgtcagcactttgggagtctgaggcaggacaattacttaagcccaggagtttgagagcagcctgggcaacatagcaagacccctatctctacaaaaaattcaaagccaggcacagtggctcatgcatgtaatcccagcactttgggaggccaaggcgggtggatcacgaggtcaggagatcgagaccatcctggctaacatggtgaaaccccatctctactaaaaaaaaaaaaaaaatacagaaagttagctgggcgtggtagcacgggcctatagtcccagctacttgggacgctgaggcaggagaatcgcctgaacccgggaggcagaggttgcagtgggccgagatagagccactgcactccagcctgggcgacagagcaagactctgtctcaaaacaaaagcaacccccccccaaccccgcctcaaaaaaaaaatgtaaaaactagctgggcatattggcacatgcctgtcatcccagttactcaggaagctgaggcaagaggattgtctgagcccaggaggtcaaggctgcagttagctatgatcgtgccatcgcactccagcctgggtgacagagtcagactctgtctcaacaaaatttttgtaaactggcagggcgcagtggctcatgcctataatcccagcactttgggaggtcaaggcgggcagatcacctgaggtcgggagttcgagaccagcctgaccaacatggtgaaactaaaaatacaaaattagccggatgtggtggtggcaggcgcctgtaatcccagctactcaggaggctgaggcaggagaatcgcttgaacctgggaggcagaggttgcggtgatccgagatcgcgccactgtactccagcctgggcatcaagagcaaaactccgtctcaaaaaaaaagaaaaaaaatttttttttttgttaaacccataagctattgttctgtgtatcacagattccagtaacatgaagataatggaggcagcatctagtcaggaacaaaatggctttaaatagtcccccaccaccacccctgcatggggggagtgtcactgaagtcccatattatgtctctcagggcgtgataaattttgcatcacttatatagctcatatggttctgagctatttttcttttctcaatggatatagttttggattgagatgtactttccttctatagttcttgaccctttaacaaaatgtattggtattttgcaattcagaatctattacattatggaagggggtccaaaaaccttgagagccatgttgttaaagctttaacataaagatgttaaagcatcttcctcatgtgttcctggatctacaacacgggataaaattcttaatgttagtttcagagttaaagagtttaacttttttttattactttcttgtcatcacaattataattatgcctcattatttattattattttgcattctccatatttaaaaaaacacaagttggccaggcgcggtggctcacgcctgtaatcccagcactttgggaggccgaggcgggcggatcacgaggtcaggagatcgagaccatcctggctaacacggtgaaaccccgtctctactaaaaatacaaaaaattagccgggcgtggtagcgggcgcctgtagtcccagctactcgggaggctgaggcaggagaatggcgtgaacccgggaggcggcgcttgcagtgagccgagatcgcgccactgcactccagcctgggcgacagagcgagactccgtctcaaaaacaaaaaaaaaaacaaaaacaaaacaaaaaaaaaaaaaacacaagttaaaacttcccatgtataaaaacacttacattttaaaacatcactgccaacgtgtgtgtgctcatgtgggagtacagatgtgtatatacagacatgtacatttttaaagacttggttgtctctgcagtgaagacaatatgttttattttttattccatatacttctctgtattttctatatttgcttcaataagctggtgtaacttttaatttttttaattaaaaaaaatttagcgtaaaattacacttaaacattagcagctgctgctgggaaaaaatggacaaattgcccaggcagccacattagaagaagaaagtcatttgaatacagttatatacttatttttattgagacacatcttgctgtgtcacccagggttttgctctgttgccacagcttactgcagccgtgacccaggctcaagtgatccctcccacctcaggcccctctccccgaccagtagccgagactacaggcaggcacagactggcaccaccacactcggctaattttttttttttgaggcagggtctcactatattgtccaggctggtcttgaactcctgagctcaagtgatcctctcaccttggcttcccaaagtgctgggattacagacaagtcatggcagctggctgagtacagttattcagcataagcataacaaaaacagaatggcagcccagttcctttgttaatgaaatagtaagggtgtaactagggcaagctggccctgtttatgtcacatgagtttgttttagaaagcattcttgagaacacaaacaaaacaaaagaaaaaattttagaaatacactcacattttaatataaaatggactgcgttttgtggctatgtgagaattttcaacataaatctccttaagaagggagtcaaatgttctggagagatctaaatttaatacaatctcatagggagcaaaataaggagttgctgtgataaactttttgctttgccaggtatgggctacaatgattggttgaaatcatccaaaaatgaactaaaatcacaaattcattttcacagatttattgttagaacttatgttgcttccttaagaaaacgcaactatattaactcttggctatggcagtcaagaataaaacagtcaaggggaaaaaaaacagtggctaaatttataaagttatgtgtatttggctttgaaatatttttggaacatgaaactggcctcgcttaggtaaagaatcaatttgccatgtcttgtaacatatctatttgaaggcattgagaagagatcgagaaactctcaaactgaatgtacttgtgataattatcaagccgtaatgcaaataacagaaaggtcattgtcctattccttgcacgacatctttctcttggtaatttgaagaacagggtctttcaattaccttttttgccttcctactacagcaatacctcacctgtgatgaatctgtcctctggcaaccttctctgtcacaaaccatctgagaagttaggaagtaagcaaataggcctttaggttgccaaaacagagacccaaagttcaagcactacagtgaatgcacttgatttcagaggaaatctctttagacccagtacatcctatttataattggtttttacacaagcttagttatctggttgggttccaagacatagctaattctaagacaaaatattaattacaagtagagggagggcctcataagatctagcatatgactacagaaggaaggaaaactacagatgaaggaggaagaaaaaacataaaaaggataaaaaccagggccatttagtgttggggcaaaatgtcatataaatcttagaaggccttcagagcattacagcatatacaataattttatacttttttcataagtgtctaataaattttttcgagaagagtaaaatactctttatttcgtattacactttgatgtgtaatattaaatgttctttatttgatttttattagattttgttgtttataagatttttattatttataaagtatatttgatattacactacacaccaaagtgtaatatcaaataaaaaatatttaactcttctcaactattacactttagtgtataatatcactctaaatattgcacacttttctaaagcctacactaaaatgcctttctgtaagtaaagggaaccgttttagatacagggaattctaatgagattggcacagtcaaagccaaaaatataaagtagacattgctacctgatcttcagaccttgcctttaagaggcaacagaacacaaaatacaggtgactcttgcttggttctgagacagtgaaggaaattcccaagtatttaaatatattcacataaccagttatataaatctaaacataaaaccaatctccaataggttttaaggtggtattcaccatctttatgaaaagttgaacattactaatgaagtccaaccatatctttagaagggggaaacagtgatagcatttactgaatcgaaattactattaaaattcaaagaaacatcaaacatacgcatttaaccacaatccagtcttagttaacaggactgcccaacaaaaatattcagtcagacattaatgatctgaattctggtgtatgagatctattaaattatggtacacacaaaaaagtcatgagatgttcctgttttgtaataaacaaggcagtggccaactaattaatgcccattagtagcttttttgagataggctatcattttcgttccagggatgaactttttgggattctccaaatactccatcagtgtatcctgtcttcaggtgatgcttttgttcttactggcgtctgtgtaagtgaatccaaaggcctcctgacctgtcctccatccagagaccatggagatgtggcccagtcttgtgtttgcctccctttcccccggtgtggcactgggcttacttctagacaaaaatcttggttttctcaacatcacccatatttaattctctctttcgtcattggcactactaaggttcccattcagaggccaaacatcctgctctccaaatttctaataaattttaaaataaaatttctgatgactgtttatcatcaagaaagtaaattcgattcaaaattctctacagagaaaagaaataggtcataatttagaaatatttctttaaaaatatttatgataactgccctctttgttttcatgtgtttacttggataacactccagttatttggatattcagctatcccaattacttactaaagctctaatcagctgagattcattgctgtttgctctggtgatgttctaaaatacatgatcacagagatgtctgaagttcgggtttacttcattatattctttgagagaactatccagaaagtaacttctatttccagtttgcagaatgtttctcttgtagcccaagggaatgtgttccttatgaatacaagtagacttgaccaactggaggaccaagtacagaatttcctatgtttataatgcctccatcccagagtttataacagttcattatggttatttaaactcaagcaaggccgagcttgtatctcattacataatagtacaaagtaactcagccaaaactttgtgttcactcccctggccttttttgtcttgtaaccaccacctctgtgatttttgctgcttccaaataaaggccaaaccacatgtgtcatcttctacatcctctcgtagtgccagaaagcctcactctctagttctccgataaccataacagttgtgagcattctatatcttatttaacttaagacagtgggttaattttaggtatgactatagagggataatgcaaattctttcacagcaacttgaagttcagccttcacagaagcagagagtactacaggtggcagaaaattattcctgccagcaaatagtagtagaacaagtttctttagaacaaaaggagaaaaagacacatccagtttcagtgggattaaattagacagtgggagttggctacctaaacagtacttttttgggtacttattgctgttcaagcatttggggatgtgctatgcataaatacatgctctgataaatcttttctttgtcctttatcattggattggggtggacaaacaagtgttcctggaggcagaatggcaagccaccatattcacaaaaggaagataaggaagtacaaactggatacatgaatggtgaggggaaacatccactgtaatttgcaaggtttcttcatttacgaaggcttttaggaagaagtgaggtttgaatcaaagatggagcctcccgcagaaccagaaaatgatgaagagaaaggggaagccgtgaacttccaggcatagaggatctctttcgtggccaatagactcatgaaacagggttatacctgttttatcacaaaagatgccacctttgggttatggtccacaggcacattccccagtcagtgacaatatcttcacctgcagagtgaacacgagaactaagaaaatagcctggacactcagaatagaaaaaacacttccctaaaatatttagacaggtaatacaaaatttatttaggtaactgccttagttctctgcttttatatcacctgttcataaaagagaaaaggcgggatagaagtggggtggaggtgagaataaatggcttaaattcagaagttgtcatgccagatttttctcctccctgtttctatttatgaaactttgcacagcaccctcaattttgagggtagatttagaatgtattttcacttggcgatggggaacacagatccccttgtccacagttgtgggtttataagaagagaaagcatgaaataaagatgggagagacacccaggatgagatccgttttttcctaaacactcacctgaaatgccagacattccaaaagcttttgcatttacagagagtgagaaatctctctgctgtctgtgcttcattggaaagtagagggactattgctctttcaagtgggggagatttgtgtaacagaaagaaacagcagaaaataggtcagcaaagtccagtgacctgcacagatgggtgttttgagatgtgtaagccgaggttccacaatcactacccagattcacttacaaatatcaggagtaaaggccggaaatagaaacatattttccaggcaagaaggagtggggaagagggagaagtgggttatcttttttccttcaaatcactaccatttccagcatttgaaaaaacattttcttaaagtcattttgctcaacagatgacagtatttcttgggaaagtagtaagaaaaaaggaaaaaaaaattcaagcagttttttttccgtttcagccaccaccttccttttcttcccacctgtgaatatgaacacaagaccacttcattcttagggtactttattggccccattctgcttgcatatcccagcatcgtgcaatcactaattgtttcaaacagtaacctagtaccaaacagaattttaacattgccactaattcttttgaacaaggctgtgttggcaattatgaaacagggtagacgttggcaagtgctttcagaataattatagggttcctcgagtagtacagtgtaaacaattgctggtttaaaagcgttattgtgaacagcaatttatactaaaatttatatttgctccttgaaaccaatatatgtcgagagtgccccactccctctcctacctccccaccttgagctctcaagggctttggaaccttttgattttatgacacttttaacttagcaaggcaactacaaggcatgtctaggccacagtaaataagggtaagagtaatgcatttaatcaatgggcatgaatgaagtaatgaaactgtttcagctctggccacctggtgtgctcccaggatactgacatacagaaaggccattttggtacagagagaagctaagaactgcagtggcatcatttttgcctggcaagtagggcacgctgaagattatcacctcttctttggcttatgatggcatggatgcagggcacagaggaccaagacacaggaagctcttggagataatgcagctctaaagtggccacagagacttattacaatatattttttcctctctgtggaaattttaattttatcctatggtacattaaaaatgggtgggtacatcagaaaaccagggggtgagcgtgggggaaagaaagccttgatgattgggggagaatggtttttgaagggctcttctctcttctctttgggtgaatgctaaatggcagtccttcttttccaaacaggtgaccgtatgtgtcatcttcttgtctttctgttgatcctagtggcttctcttacccagcctgagaactcccctgagatttttcgcatcctgaatgtttctcaccaaagtagctagagttctaggataatgtgttttttgtttgaactgcggttcctggtttctgctctctaaagcccttttaagtcatattttccatgattgttcagtgctggctttggtatttaaataagcctttcaatgggtcattagccctgtaattaattctagctatttttaaatggtgccttggttattaaagagcccccatattcacaacagtcttgtctttcttggagaattactaagcatttgctgatttttttttagtgccaaaaatattgcaattttatctcattgtgaatatattcctcattgataggaagagtcaatctttttgaatgaggacagaaaatatttaactgttacacttccatataatagccttgtgcttttatttttctttcaaataatcataacaaatacccatcctgtaccccaggccctgtcatagctatatgtgtttcactttacttacattttaaaaaatcaattatcagcaaatcacagtacttcaatgggaaataacttcacagagaaagagaagtgactggattaaaatcacttactcagtgttagagaggaaaaaacccaacttcttcctctacccgcttatattcagtgtctggggccccacaaaataaacttacaaaagacaggttaacgggagaaaaaggattattttatatgtatgtgaggaggcctcacagaaattaagtgaatacccccaagaaggtcatcagatctggaggcttatataccattttaacaaagggcaataaacttatggagaagtgacaagataaaggaaaatggtttgaggcttctaggggccatatattgtgggaaggtaaatatatgtgggaactaatggaagacaagggttacttcaataaggtttgttttagcagatttaagtcagtgcccatctgtagtgataagggttgtctcctcttcctggtatggggttggggcagagggcacctttacaaggggaaatgtatgccctgcctataggcagataggggtagggtagagagctttttctgctgtttctcagttgctttcagctcaaaataatcttcatgccaaagtgtcataatttggggtggcatattctgatcttctcaccagttagttgcagagctaaaattagaacttagaccatctgactcttagcccattcttttgatttctctatgctttattatataatattaaaatagctgttagtctctgtgatactactacaagaggcttaccaattctaatattagaaccaaccaacaagcctggctccacacccttggcacatgtcacaatcaatcacagcacagtgcatctcaaccagcccccaagcattcacttgaaatccatgtgactcggaatatgagctgaaactcacttgccatcttgaccttatagtaatcccaggataaagcagtaattcctggttcagaaaagcagatggagattaactttgattattgagtattatctgggatcagataaaaatatcaatagctcatataacaatagtaatagcagttacaattgtatgccaggcattgagctagttgcttacatatattcttgcatttgagcctcataacagccctgtgaagtaggtactgttatctctgtggtagagattaggaaatagaggtttggagaggttaaataacttgcccatgatcacagtgctaataagtggaagatttagcattggggtccaaggctgtctatctgtaaagccactccttgacatctgacaacatatatggagaggtccatgtgctgaccacttgtagcccagccctagatgtcacaagagtagttattaactttctcacctccagccttttcttttaatcctgtgaattcctttgacatctgtgggtggcaggctctagtaaatgtagttcagaagaagatgcctgccccaattgatttttttagacactttaatttgtgttggttcttgctgtagtttccacactagaaggaaagacctgaggctgtcattgggtattttaataaccctttcattccactccagggtagtagatattacatgctagaagcaggtggtaggatttcctaatttatttattcctttggagcacctgctatgtgtcaggcactgaggcaggcactgggaagacaggatggagaagaatgacaggttcctgctctatacatcttattcttaatgtgtggagacagctaataaatacgtggcattccagggactgataaaggctttgtagaatgaatgcaggtattcatagcaggtgacttgcggggagagggcgagggatgccttgggtttttcatttcctgtggaccctaggacaaatattaagaaaaacttttcaaaaagcaagataagcttctgtatctctgaaatgactgcagtgcacttgtggctcagacggagactgaggaaaatgtaaaaagacatggtgtaatttcagtgtaattttcctgtttgacaccactatcattttcccagtcttctgggcccttctctccctgataactctctgcacctgcagctgcatcgtgttctacctatgatgcaaggctcactgcctctccctaacaccaccactgtgaaccacgaaggatcctgtgttttgtgtcctcaaagtcaggtcccctgtggctaccgaagttcaaccacctacactgataaaagagcctcggctcactcttcccaagtgaattgtttctgttcacactggttctgtttttctctgtgaaatgaggaggttgggataaaccccagttgaaaaggtggcaggagaatgaacagatggtggcagtatcaccttggtcttgcccaagcttggtaaccttaggacagtcactttacctctcagtctcaggtgccttgactgaaaagaaaggggtttgatttgttaatcacagaggtctttatggacctggcattgaatgatttaaaaggttccatgtagctctttagagtacactaaacaaaacaaaaactatgatttactagaggctgtgcatctctttccagaggagtttcagaccaggaaagaggacagtagtacagtatcattgtggggcggtaggaaaaattattcaaggtcttttaactttcattcctgaggacagttagtgagggaaatgaactcttatgaggttgttaatgagatcagagcaaagatggctctttgtactcccaaactatgtttaatttcttaaactttagaaatggcaggttttaactaagtcagccagatgaggatgtgggaaccgagcagggaccaggatgagccaaagcatcagaatcacttacttgtgaaactgaccggcttctgcttgttatctgtcattttactccatattgaggtcagagtggtaaagctattttgcagtatacatttccttttgcttaaaagacatgagattatcaaaacaacagggaagggacgttactcactctcaccagtaattttcaaatgctgaaaataaatgtgcctagatatagtctccataaatatattaatgtgttgcatattccctatatagctatagttatttcttaattgatttcactctgcaatactgtgaaatcgccttatggaaatctgaaacataaaaagataccactttttatgactttgtagctatcctgttttcttctaaaggtattggttaagtgcattgaagcatgggtggtccacacagtggctcttccagacaaactaaattagcagaaggagcagcaaaaccagcagttatgcaaaatgtttctttttgttttctttaattgtggtaatgagttcattcaattttgaaagcttatctttgtatgcctgtcttccatgaaattttgaggtgtgaattcagccattcattgcttgagcttttattatttcagaattagggtagcattacttcttttccctcatcatccccttggagagtcaccatctagatgataatatatacttctatttatgtctttctcctagtgtccttaagccttaaggaaaagaaacaacatcaaaaaacattaatttttttccattgaaagctgatccatgtgtgtgctgacaataactttaatccctttaatgtccaagtgaggaggattgaaaactggtaacactttcattgatattttttaaatatgctcttatagcaaaaaaagtttgatatctttttggtgaccacttaaaggagaaactattgacgcataaattataaattctatggctttaaatattattttttgagatgaatgtgtttggggtagaatatgaacaacttaaaactttaaaatttccatctaaatttcaagtcttaaatgtgcctcttggttttttgtttgtttgtttgtttgtttttgagacggagtctcactctgctgcccaggctggagtgcaatggcacgatcttggttcactgcaacctccatcccccaggttcaagaaattctctgcctcagcctcccgagtagctgggattataggcgtgtgccatcacacctggctaatttttgtatttttagtagagatgggatttcaccatcttggccaggctggtcttgaactcctgacctcatgatccacctaccacggtctttcaaagtgctgggattacaggcgtgagccaccgcgcccggcccctcttctacacttttttcaaggtcggaagcagctcacatatagacaattacatcttcagccacttagttttttaatatcactttcgtttcataaaatgagctatgttgtccttacaattcagttgatggccagaagaaaatcagaccctttataaaaagtaggactttaaaaagcactggtgtcctattgtaggctgtttcacaatacacatagtaaaatatgaattttattgtttgttttgttgattgggaaggagatgggagggggtggagagtgacgttatagtttgaatttataatttgaaagcagagaaaatggatgaaataaaaagattaccatatgagtatcaccagatcctccctcccacacacacatacctatccccaggcaatctttctgtgagaatttaccttggtgtttaaaaatcacggcaatataaaagtgatattaaaaatagtatactaccactgtaagaagtatgacaaacatgtgagatcctgagaaactgcagaatattttctcattcaaagtttagtaccttggtcttatagtgtttgacactaaaaaacatagcaaatactcttttatatttagcctattccgtgatgccttgtttcttaaattaattcatgggcaatgaatgggggaggaaaaataacaacaacaaatatgccctggtgatatagtaaatgccactttccaacacttgctcgctacctaagaaaatcactttattttcttctctcatgcccagcttgattgcagagagcaagagagtagatggaaactgtggggttattttttaacgttatatcattaactccatccaacacaacatgcttaattccttgtttctcgtaactttgggatgaagtatggtgttttgttgcctgtttacaaaataggcgacagacacagaacataagagctgctacatatcatagaacatatcgagaatgccagagatttttcctgttttcttccacaagaccatgttaaactgtgtgtatcaagtttaataagagcaatgtaaagctacttgattacatttttatccacaacatgattttaaactaatgctattggccaggcgcggtggctcatgcctgtaatcccagcactttgggaggccaaggcgggcggatcatgaggtcaggagatcgagaccacggtgaaaccctgtctctactaaaaatacaaaaaattagccaggcatggtggtgggcgcctgtagtcccagctactcgggaggctgaggcaggagaatggtgtgaacctgggaggtggaggttgcagtgagccgagatcgcgccactgcactccagcctggggaacagagcgagactctgtctcaaataaataaataaataaatacactaatgctatttaccgtgaagtgtagtagttatacttcgtgcctcccagcacttgagggtttcatcattgccttacagtatttctcagaaaataacacattctcccctggaaattgttggctgactttagcaaattcaggccacctattcatttaagactgttgtgtgtgtttgattatctagaatgaattgccttaagagtctcttttggaaaagtactagcacagtgcccgaaatgccagggagtggaaagtcatggtctcggcggggaaatgactgcagtgttcatggagacagtgttttcgcttggctgacattaatgacaacccaatgctatgtgctcactgagtgttttcatttcagaagagcatcaaaaccactgagtcctttcaagtcgtcttcttttactgtgaaaccagaaaccatgccgacgactactttcagtaataacctgtgtcccaactgcaggctgaagtaaacttcttctcatataattttctaatttctgtgtaggggtagttgtagcaaacaacttagtttctttcagagcgtgacttcagaaagcgtattttcatgcagcagtgatgggtaatgaaatcagaatttccacaaagtctgccctaattgaacagcattatcaggaaaaataaaacatgagactcagagttttctcccaaagtcatttatgttattaggtaatgaagctgattttattttagcaaacatactaggaggtatacttccacgtgaacattgccccttcaaagcagtcaactggaaaggctgaatgtccgtgcccataacgctgtcactgccaaaagctaatatataactcttcttctgaaatggctttcacctccttcagcaatgttttcatattctccatagtggccatagttctcctagaaaagtgagcttgatatttgaaaacaaccaatagttaatatgctgaaaaaggtaagtgaagaaaccaaaccaggccattttccttaaaaaaaaaaaaaaaaggccagtcatggtggcttacacctgtaatcccagcactttgggatgccaaagtgggtggatcacctgaggtcaggagatcaagaccagcctggccaacatggagaaacccgtctctactaaaaatacaaaaattacccagacgtggtggtgggcgcctgtaatcccagctactcgggaggctgaggcaggagaatcctttgaaccctgggggaggtggaggttgcagtgagccgagatcacgccgctgcactccagcctgggtgacagagcgagaccctatctttaaaaaaaaaaaaaaaaggaggagagggactataaagtacagctgtgtcttatctcattggcactgagagcagctgcataagaagtagctccaagtagtttggggcaatgacaacataagaactttgacgctcaatcctcattttggtgtcaaggttcctggagccagtgaatttgttggaagaaaatattggccactagctttcttctagaacattaatagagtggatgacaatgaagacaacaaagagcattcgaaggctatcatccaccacaacataggagcatctccacgcccacagtacgtgtcagttatccacattaccccactgttgatcgtacacatctttggttgtgtcagaactgctactcccctaacaaaatgctacgcaagcagtgagtgtgggaagctgaagggagggacaacacgagggaaaatcctgctcaaaagaacacagaatggtgactttcattgtcataatctgatagtaatcacggacaattctgacttcagccaccagttcagaaatcactaagaggcaggagagtttgatcatgaggccgcttggtgcttttactgcagtcacacagaattccctgtttccaggctcagcaaacctctgttacgcaaactcgggttgaggacaagggtgtgctggggaattggatgtaaattttagttgtgacattgaagctttccccacaggaagtcctttggaactatcattttattccattttatgtttaaaaatataaaaatgggctttattaaaatcccatttttttaaggtttatgagctgttagtgaagactatacagaactgctacctattttcctgtctctatctgtttctcctgggaactgttttggcttaccgcagatggaggaaaagagccacactggagtgaaatgaatgacaacattcccggagaagtctctcacgatctcaaaatccttggcccactggtcatttatagccactgctaaagtatttgtgaccagtttcctttagtttaacaattactctctcaatagacaagcatccatccaaataacaatttgtcctaaatcaaatccctggaatattaaaatacatcattagtttaggaaatctgttagttggccctcaaagtttttcattttttcttacataatcccttcttgctccccatttttcagttagagttgaataaggtagggcctagcaatgtcaaccatgatggagatgccacatagtatttgtcaggttagaagaagggtgagaaagcatgtagcaggtggaacggatggttccacagccccttgactccctgacgtagaagagactgaaggcaacctgatcaccacgttcaaaagttggctttctccattttaagttcttccttaaagcctctttaagcaaagtccctgaaatgatacagtagaaaaatcacacagacttatttaaaatgaattctatcactattcctgagatctcgcctgccccactgaggacattttgttttcgcaaagtgctttgaaatgtgataaaggatcttaaagaatatttgtaaaattatgcccaaagaagacattctttgaggttaacttgcagtgtctaaaagtcaagaatgaggaaggaaaggaaaataacagattcactttaaaatggaccacgctaattgggcagtgaaacatccttgtgtcacaccatttaccgtagcagaccagaagagggaaaaggcttgatttttctctcatagataccacagttcactctcaaaaacattcctaaaatggattgatatttctctgatagagcacctgttttgctactgacagtgttaagttccatactaatcagctcatctagcctaactgacaactcaaaaagctgattccaagaacaagaaactggcttcaatagaaatattatggtttattttgaagcgtggggacaggtaaggactaaacaaatttatctttgtgacatagtttaaagggtattttaaatgaataataattcctcataagtgctagccattcgtctcattgttggtgggtgtgtttgaggtgcggctggtttttaaaacaaatataccaaaggttatgaaccccccaaatattctgttccattcagaatttatttgtaagtctacgcacttattcaaatgatttttttctaaactttaattttctttttttaactcaatttcttggaattgctttcagtaactgcttcaggcctctttgaatagcagtgaaggcaaaatcagggcaagtcgtggtgaacagtttggcttttctggaacactgagctgacgccagccaccccactgggcttggttccccaacatctcacagcgaaggcacttgtctgatgcatattaagcttttatgttaccaccgggggctgcctcagaagttactcctctgtgtcctgatggtccttgacttggccttggactgtccttgacctccaataccttagacagttgcaggtgggaacagtgtagcttgaggttctaaaatgctttgctgatggaaaaggttttgttctgaaaagtgaattacaataggaaatggatttgcattactgacactatctgctgtgggctttgcctctattgatttaaagcaaaagggcacaattagtggccttcaaagagaggggaaaaaaaaataacctaactctgtcctagcacgttcaattaacttgtttactttgaagggaaaaaaaacttttatttttacatcaacagcgtattagcatggtgttgccttgtctcatctctaatggcaagacatggttttgaaaaaaaattctcttcgtttcatagtagtaatgttattttctaacattaagcacaacaacaacaacaaaaaaaagcagggagagcacgaggggttcggtgtataaaaacggtgttctagctgccagaacttttattctggatctcgaagagaacagttcattgtatttcctttcctaaaccaatgaaaatgaaaaattagttactaggtagaattctcttccactttctatcccttttccctgacgagatgaaacctgctgggttttgccataaaaagaggtccctgttggggaaatgagagttcagctcactcttcacatcacagtgtaatacagcaggactggctctggaagattatgtagtgcagcactatgcctaagaacagaagaggaggctgagctctggagaaagagggtcacaaagcgttacaggcatttggtgaattttgctcactgcacaggcagttgtgagagcctccgaaccctgtagttcagtcttttccccactttaccagtgtgtgaggcctctctcccacttcctccacttaccacctctccaagatgccagcctcactgtgggctttccctagaaagaaacactggtttctttctatcgtgccctggttagtgttgtttctcacattaggcctctgtgttagaaataaagctgctaaactccatgtcgttacacaacaaaaggaatacagtgacctatccttcattcttctgatagttccctcaactccagctgcagcccctgccaaatactatcatccttaaaagatagacagtgatcccagcactgtgggaggccaaggcagctagatcacttgagtccgggagttcaagaccagcctgggcaacatggtgaaaccccatctctactgaaaaaaatataaaaaaaagccaggtgtggtggtgtgtgcctgtagtcccagctactcaggaggctgaggtggtaggattgcttcaggccaggaagtggaggttgcagtgagctgtgatcgcaccactgcactccagcctgggtgacagagtgagaccctgtctaaagaaaaaaaaaagacagtgatgatgattatagctaacatttatggagcccttactatgtggtgggcactgatgctacaggcactttacttgtgtaccctgtaataatgagatagggctcgttttaaaggtgaggaaactgaggcacagagagattaagaaagtgtccaagttctcatagctaacaaatgtcagggtagagattcaaccccagactctagattttgcaaatcaaatctctacactttgtcttcaaggtcataatcaactctctcctttttccttaaaaaaaaaaaaaaaaaaaaaaaaaaaaaaaaaaaaaaaaaagttttcactttcatccttaattcctatgcagtgaagctaacgtaacaagacgaggtgcgctggtgggttctgtgtatcctttccgtgtccttggtgcccagtcacgcaggttctcagcaagtggtggcaggacatgcagctggatggactcgtgtgtaggcccacatgttgggggtggggggtgaggtgtatgtgtaagcatgtggggggtgtgtgtagggtgcgtgtgcagtgtatgtgtgtgtggcatgtgtggtgtgcatctgtggtgcgtgtggtgtatatgtgttgtgtgtgtgtggactgtatgtatgtggggtgggtgcgtgtgtgtgccgtatccttggtgcccagtcatgcaggttctcagcaagtggaggcaggacttgcagctgaatagacttgtgtgtgaggtgtgcccgtgtgtcgtttgaggtgtgcctgtgtgccgtgtgtgggaggtgtgcccgtgtgccgtgtgtgggaggtgtgcccgtgtgccatgtgtgtgaggtgtgcccgtgtgtcgtgtgtgaggtgtgcatgtgtgccgtgtgtgaggtgtgcatgcgtgccgtgtgtgtgaggtgtgcatgcgtgccgtgtgtgtgaggtgtgcatgtgtgccatctgtgtgaggtgtgcatgtgtgccatgtgtgagatgtgcctgtgtgccgtgtgaggtgcgcctgtgtgccgtgtgtgtgaggtgtgcctgtgtgctgtgctgtgaggtgtgcatctgtggtgtgtgtgagcatggtatatgtgtgtagtgtacgtatgtgtggtacatgtgagcatacggtgtgcatgtgtggtatgtgtgtgtatgtgtggtgtgtgtgtgcctgtgttaccatttaagatggtagcagctattggcattaaaaaggacctgctattctgagctctggctttgacagtaagctgtgcccacagcagctgttagcaatcagagtgtgtttccatccgatgtgaaatgtgctgccaccacttgtgaaatggatttcaaaaccttgccgtactgaagtaccaaagtgtgtgaatggtatacttttactgcaaattagaaagattcacttattgcagtgataatgtcacactcactcactcaagctatcttaagtgacagagacacacattgccaaacagtggatagctgatagcagtgttttcaggacagtcatagaatgtcatctgaaatgtttgtctctgtaggcaaaagaagcaccttggactagaggagcagaaactgaaaatggaataggaaggacagtggtgcgggcctcgttttgatatctttacatggctgttgtgttcttactttgcctctagtgcatgacttacataaaaataagtggcttcaagataaatacagaggctatacatttcgttttcttggggaaaaaaatgacatttatgaggtgttatagtgtgtgcattgatgctcagatgtcagaccttcttaaaataaatctgacaatctcttagcttagtccagagcatttcttctccttatgtctcgcaactacttaaatccccaaagctctgctgcctctttctgtatttccctttcctactaagaaatagccaccagctcctgccacttccccttgggaataggcacagaaataactgtgcttcagctatccacaaatattgctatccattctcaggttgagcttatatgttgtaattaagaatggaaatgtttctttaatcagcaagtttaaagaccatgcatttagggaaagtcagaaacaagtcctcacgttgtttggtcattagtatgcctggctgaactggttgtcttagaaaagcattacaaaagagaattttttgaaataccattgagccacagttcagaaatacatctgtgatgtatttgaaaggcttagaacttgccatattttttgtttagatgttaatgaccatgtcctggaaactggaggtgaaggaactagttgaatttctaggagttctaattcttcaagatcttacaatcttaaagtggttaatatgaaaacatttacacttccgcttctggcaagcctaaataatttgcctgtgatttttaataaaaaccggatccttccctcatctctcatccaaagcttcatcctcttattaattctaaggacacttttttgaaatggaaaacagcacagaggtggagcagaaatacaggctgtgggctaattctcttaacagtcctcacccactaaaatgatctgtggaccaaggaagttttggtgtcatgacaccatgttcctgtgactataaatatgttgtctttttagtgttctgggcttgctatagagggatgtaaatgcattttcaaggtttaatgttctaagttatttccaatcttttaccatgaatccagtttatttagttggggaatatttcttgagtgacatctattcaatgagcagtagcagatcttcagaatgccatcggagctcatggaaagaaatgatgggttcctttgcctggtaagcttttatgacttaatctggattcttgttattttgacccatttctgcacatcttacttcatgcagctgggttttgtgaccgcacagttttggggggggggggtcatggaaattgtgcaggtggaattagtaatcaatggttgttaagaatttgtggggttatgtgaaatttggtgtgaagttaagacagctgcaaagtggagtggttttctcgtaggcttaggtgtgagaatgttgggggtaattggttaaagtaagattgtttcataaaatgcagtaagtgtaattctgatgttttcggttgagcagaaactagatcaccagatttggtatggttttaaagatgttcttttctgttgtgaaaaacagaccttgagcaatgaaagcaaagagttgaccccagtgctctcagctgtaaggaggatttcacctaaatgtagcgtaattgttcctgttaaggagaaaaaaaggaattggtatctagagtgaggttgatcgcaagaaaatacgtatgcagttctgtgagtcagatgactttttttgtctagtattatccagaattatgtaagggacaccattgttggaaacaacgttattaggaatttcccttgagcatagtctaatcacttagcaaaataaatgggttctctttcctgctgatatgaaatgacatttaacccaccccgagagattctagagaaagaggacttttgttaaatgttactgatcccagggtcctagaaaatcttcaaggactttatattttaaaatgtagttaattctagaatcttagagggaccttacgccaactgagaaccattggttaaatagccaattacctttatcttagcccttgatatcacataaccccataaatccttaacaacaaatacgttctgttgtttacaaaggcaaaagagaggaaaaacaaaaagaaaaaaaaaaggattgtattgctgatcctggtggtatcatttattgggtgagaacttacttatttagtatctgacccactggatgagtaggatgaagtattaggaagcttattctcttgctgttcaggtctttcactcaaggtttaaactggttaccaggtagataccaaaaaaggtatagagtcaactgccttaaacagtttgtgcactactatgtgataggagaattctagagagaactggatctaaaaaagccacccactgttcttctagatgaaaaatctgtttcctctctgatttgacagaatttccctgtctagggataaaagtgctcatttggatttggcttttagcagagatacatatgcatcagggaatgtgagtcagtttctctagaaagcttaatctagtagggatggaaatatattacaaaggattaatattcagttcccattgtcagaaccacctgcatattcacagaaagccacatgagaagatgtgcctggcttccttattcttcagagatttcctgcacacacagctcagctttctcttaattcagatgggacattctggcgcagtattttaactcttacacaactaagtctttaaaagactgaagaaaaatcgtcaaagttccaaaacttcaattttgtcttattttaaatttagttcacaaatgtttgatctcttgatggtttgaggagtgtgtgtgtgtgtgtgtgtgtgtgtgcatttggcaggtatactcaacactttttattgaaaaatgttttttttaaagccattaagttttccggagaaattacaatccagttgaagtttttgagaagtggcttgtttagtaagatgcagaacattttttttaatggctataatttgatagactcatttgagtcagatgtcaacttaataataaggcttgggatgtctgtcagagggtgacatatatgtttattatgttaacaagtgggaatcgtgccatttccatgatgccccgacaagaccgtacaagccctagataaagctaggtcaaggactttgcatagagaggcgacctctccatctaagtgctctttttcttctaagttgtgaataagatagtaacatctggacccatcagtcccttgggaaagcatcttggaaaccaatgattaaaaaacatttaagtaagtctagctagcagatgagaattatggtactgtgtaatttttattctctttgtggcatagctggatatgggtaataggacacagcatcgcaatctttgccatgaatgatgtggcaagcttcctgaagcttcccatttatataggtttttcatcttcaaagagctttgtgagcactcatttaccaccacctgcctgggaggtaagaattattcccatttttatggatggaggaagtggaggtgtaagtgaattgcttgaggccacccagggagttcagtctcagagggagacctggaagggccaactccacctcttagctgaattgactcccagtgctttctttttggtgtcatgtcctcttgagagccccagatcagtgatggcataaatctaaacacatcaaataatcttgaataggaaagagacaccaagtctctctttcttgtggctatgtctacatcaaaaccctgggaaatctggacatagagaagaagccatttaaccctcctgaggctcattttccgtatctgtaaaatggggatgataatacctatctgcctcctttagggatgttgaaagcaccaaaatcaaagcaagctaacaaggataaaaactttgaaaactatatagaattctgcaaaaactcaggcattactatttttgccaaaaatgactgcgagactgcttactgaaggagtagggctttctatttggagatctaattgttttggtgaggttcagcaaggatgaaatactgtcatgaaagaatccaaaatcaagagaagaaaataatgtactagggaaacatattagtgttatatttaaaatgaacttagcagaccaagtggccaaacaagttcatcgttagtttgcataggatgcagctataactcggctctactcatccctgatggccattgaacatgcctgtgctatggaacatacccatactctattccaagccacaggtccaggtcgatggtctgttccccttccacatggagatgtaatgagagctctctgcaaacccttatggtgtcctggggcctcccatggcagagtggagagaaagcatgttgctccctgaactgtccactcctagcactgtagagaaggggcactacccctggaaggagggtttgaaaaaagggagcttgtctgggtagacagattgaagaaaggtttcctctctccaggctgttgcagtcactctgcagcaaggctcacagccaggtgcatttcaacctctacttttgacccctcagctaggccgcactgggcagagcacaacctgcatgaccatctttagaagccctgaaacaagggggccacaaaattctagaagcctggtgctcctgaagtccctccagggaataaggtgaagactctgcagctctcccccggctaaccttgacacgcaagccaggccgccattcaggcagctgcagaagcctttaataccctggcagttttaaacaggggataaaataaagtgactaatccataaaggactcaagccattttactgaaaataaaatcaaatgccttagggtttttctttttaatctttattggtttttctgcttagaaaagtaatacatgctggttgtaaaaaattcaaacattagagaaatatctaacatagcaagtgaaaagtcctccatattctctgcactccagaaaaaaacaccatcaacagatctgtgtaaaagatagataggctttttaaagcactagtttttgaccgtttttgcaagacacacaaaattggttgacattcataagtatgacagacatgttctcataggtgtacccaaggttcggccattggccgtttcctggcaagccagcagtaaccccaccccattcagtccaattcaagaaaatatttggttgtgcaattgagctagagtgaacgatattattggggtaaccttgggtctatattagtttagtttttatgtgaaccaataaaaaactttaattttgtaaaacttttattagtaaccaattccctgtgacactcctgcaacttattgcaacataccactgtgttgtggcaaacagttaagcagcaatgttgtgaaggattgctgtggtagctggtaggaactgcctgtcatgttatttggaggataagcagcttttctctatccccacctcggaaagagcttaaagtctggaggaaagaatttcatttcactataaggcaggatttcttatcaacaacaacaataataataactactatttactgagtgccagctatttctaagaactatgtgatgggcatatatagagaatacatatataaaatgctcatacagatatcatatatatggtatgtcatttatgtatcacatccttgaatcttcaagtatgaaactgaggctcagagaggttaagtaatctgcccggccttaagaactgtcaaacgttgacattggtcattttagggttaaaattctaaccagaattttgtgaaactgagatcagtggcctagaaggttgatggttatttttagttataaactacggggataactcccagcaagagatgttgacatcaattcctgagtagtgtgttaagtttaaacaaactacttaggggatgtcttttgagccctggttagtgattgcttaataagagtgcaatgatgatgatgacaatgatgacagtaacaattaagtaagtgatgcctaccgcatagggtattggaggagtgagtgagatataatgcgtgacacattattagcacaaatacatgtagatattattattataaattagattattattgagagatcactactcacccacagaatgaagtactgggtgcctgtcatacaatttttatttttttaattctttgggaaaatgggcattgttctctggaccatgttatctcctaagataggtcctgaggaataaatgtcatcttaagaatgctagtgcccaagttcttgttccttttataattaaaaattcaaagcaaacttcttctagaagtgcagtgctaaatgacagcctagccccaaggaccacttggttaattagcacccttgcattccaggatttcctgatgcccgctgccacttgttgtcagctccttgaaactgcatttgcctctgcaggtgtggagagcctgcttgaattacacagggtgcatgagagagcaaattatttaggcaatagggctgaaaatgtgggcaaattagaatttttcatagcaagattgttcattgtgaagccaattcatgattatatgtgcgcatcttgctccagatattccactacacaataaacctctttgctgggatgaatatgtatgtgggctaatttaatcaatatacttgtgaacgttgacagtagtgctgtctgacagaactcatcctttgaaatgctggctgagttaatgtgtgcagtatatatatgggccaagattcataatttgtgttaaaagaagattgttttgagaagacaccacactacctggtgggaaactgaaaagcctacacgatgaaaggcaaagggcagagggatttttgtcttcctccttcttgttggactgaaaactcaaattgacaaaactaaactgcctccttttgaaaaatttgcaaggcattgactgcatttttttctcatggattcatttgaattctggaaattgactaaaatgggggatggagagggcttttgtgcattgttgggttaaatgaagggctgagcaagtgccctgctccaatctgcaaatgctcgctttctgggaatatcaacacgtgtgatcagatcacattcagagggtttgcttttggagtaggaggattttagtcatttcctaaagtgcatttgcaactgaaattgtcatctgagataagagaaccaagcaggaggaagcctaggagaatagtttaaccaatcagaatacctcaacttgctatccagaaacccttctaccaccttaccgagagattcccggtgaagcctgtttcaattaaatctgattctttagcccactggaactaagcacagacacatggggacaaagatctaagtgaatggcccccctgtttggaaatacaagtcaatctacagtgagtccatttatcctaagcgtcttggcctccacagatctcgtgactgtctccgctcaaatatcctccagatctgaaaacccctgcaagctgaagcctgactcaggccatcagtcctgtgtcacagtggcaccaaactctggggtctgtactacaactgctccccacccgcacccctaccctcacccctgccaggacatgagccattccaagggtggaagtgctggggccagtatagtactcccaaggccacccccatcatgagcagacctccgtgccaggcaggcatcttggtcacagccttaaacatcgttgcttcacttctaattagtaatccactgtgagtccaggccgactgtacaggaatactgcatatcattttcagtttgtccagatgcagttctactcattgttctcaatatgccctgcccagggccttcatattcttgtaaaggactaaatagacatgcttgatctccctcattgttaagatggaatgaagataactcttgaaaggcccaagtttagcgtcaggtagttttgatgctgacttaaatgctaggacctaaagaggtttttgttcatccctaatttctgtcattacaccttgaggtgagacatggacagaagcagctccaagtaggtcttcttcatttcatgtataaattctgtttaacaggtggttcaaggacttcatggtgcctaattattacattcctaggaatcagggtaaggaggctggttctcattctagcctactcaattcatgtagggaaaagcaggcaataactctcagctgatagcacctttcaggatttctctacttccacttggcttttccacgtctctgaaaaatgttaggcgtaactcgctttctctagagttgcagatctgtggcacaaacctttgccttgactatattaaacataatggaaggactgtgcagtatgagacattattagataccatatttcataaagaatttttcttgaagaagtcaagccaagtgttaacatgaggcagacttgcaaatgacaacttttgttgaatgcaaccttaaacatattaacttgcttaagttgcttaactcaaactatacctattagtgtccaaagtcaccattattggggtattagaaagcctccagagtatagaaaatacactggatgtgagatctggaacaatctctaaatttggacagcaaagaaactcagtatgcaagcactaaaaaaatgatggatagcttttagaatagcttgcactccctaaaagtcaccacagtacttgtattaggccctgagaaagggagttaccagtacacatggtttataatgaggttaaatccaatagtttcatgtgtgctctaagtatcgaatgcaacatcaccttaaatccaaagtaagtggttgtgaaatcatcccaggatatgggattacattagaagaaagagtgggctgtgtgtctctgtgtggtacttacactatgtgacatattctttggacaaagaaattactctgtgtaaggtctggggctaggtaagggctgtacagaaatgaaatagacttgggcacttgcagttgtgtttgtgtgtgtaactcagtaggtaatctaacatgatacccagtagtgaaaaccatggaaaatgaatttagcgtaatgacacattccaggtaaactggtgactgttcccatcctgtctatacagctcagcattggtctttatttcacatataaattctatttaatagttgatctaaggattttcttttgcctaattattccttattttttatccttaattatgctctttttaactctgaggtataatgtgtttgcttagaaatgtgctttgccttatttgagaactttggtgtgatacatgttatttgtgggtcttccagcatgaggcatctttaagtaatcagttgggtagaaacacatgccctctgtaccaggaactaaatttccagtgtaaagaactcagaagcaacacatcctatttgtcaggattcatcattattaaattcaaacaagatattaactctatggttgaaaggttctgattgtacacaaatggactaatttttaacacatggcaactgcgttaattttttaaaagacaaggaattcttatcatatgtaactgattaatattttgaattgaatcattttcctaactagacctgactttttagagtgtatttttctctagcagtcaagctgtaatgctcagccaagacagatttatgatcttttaaaaataatgatagaaaatgagattggaggaaacatttcagtatctgctttgctctgaggcctaaactgcgaactctccagttcttgaaggctttgaaatgctgattccagtcttcttgtgggttcttaaacaccttctcaaatgacccattttaataacccgaaagctattatataacgagcagccataatttagtccagggctctagggggaccctcacagttcagcaatgaatagttaatgcagtataatgtttagcaggttattagttttcactatacaaatgctgatcagggaacacttttataaggtgtttaaaagaaaatgtaattaactggttgcgtgcttctgttgcagctcaaattgaaattattccatgcaagatctgtggagacaaatcatcaggaatccattatggtgtcattacatgtgaaggctgcaaggtaagcctttttaattgttgttgtttctattaatgtttgttagaatatatctttgtgatttgtatgtctccacttatgtcttaaaattcaactccttagaattttgaatgataagaaattacaggatagaagaaatattttggtgttaaattacaattaaagaagttatatatatttttactccttccttcaaaataataggagattacaaaaaggtatttgagcattgcttgtttatcactttcaaccccagagttgaactcatgagcaatctctgtggcaatcttttttaaaaaagagctaactccagacttctacaatgtccctgtcataagcttataaaaagacatctccagtaagtttaattggaatgtcactgagttgagtcttattgttagcacacataatgttaacacatctggcaaaattgtgggaaagctatcaggaagacctgagttccagtcctattgcctccacttgtccatattgttttgaatgtgtcttaatctctttgtcactcagttgcttcatttttaaagtgggtataacacctgatctttctactggttaggactattccaagaatagaaggagaacctgtacataaaaaagtccttacaaacagaaaagtgctatttaactctaaatattatcagtattatttctgctatgactattttattatttctgaccttggtcatggggcaatgtgtacagcacatgcataatgtgcagatgagaaacagagatgtttatcccaataattcaagaccccccaagcccagattacctctgttattcaaatctcaatttattaagatttaaatcctcatgcttatattggaagggcctcgagacagcttacaggataaaacagtgcaaaataaacaggagagaagctatttaaacatgcaggaggcctttgagacagccgattgctacaaccaggcctgaatcagccctaaggctttttgaggctgaggcaaaaaataaaatccacgaatttggttagctttcctttcatgaaattagaaaatacaatgttgtaaaatacaaaatcacctatagacacaaatgactactgagagacttcaaggaaattaaccttataatttccttaattcttcattttactgttagtcatggtaacatttgctaatttgtacatgtacagatgcttcatgttgatcccatcttagcaaagcttcagatttccgcatactacagaaccatctatgccctttacttccaaaatctgccctccctcaaaattagttgactaattaaataaattaagcaaaatgagaggcccggtgtagtggtgtgtacctgtagtcccagctactcagggaagacagctgcaggtttatcacttgagtccaggagttcaaggttacagtgagctatgatcacaccactggactccagcctgggcaatggagtgagaccctctctccaaaaaagtaaataaaaataatgaaaaaacaaaatgaaataatctgtctggtctgtgccatcccaggttataaggtgagagtgatctgcctgtgaccactgtcatcgcattgatttttggagctgatttggctgacgtggccaggtagccattgcttttcaccctcaccctgtcttgtgttctgcctcccaaatctgtgtccctggtagacatgtcatggcctttctcaatagagggtttatagactgcagtgcttgcctgctgggagttccagtgctttttgtgcattgcgtatcacctgggtgtcttcttaaatggacagggttctaggcagcatcccggataccagttcaccatttgtcccttcattctgcccaaaaaactgatggcttcctctgaatctgtcagtaaggcaagtgattatctaggaattgacagaagtgattatctaggaatggagtctggggaaaggacaaggtgggggtaggggctacttcatatgaaataccccaacaatttggaagattaattaacaacatgctattgagtaaaacctaagttgactgagtaccatggcacaaacaatgtgaattttctttttactcttaatatttatcatgacaaaaataaaagcgataagaaaacaaaaggtatctattattccaaagttgccatttttctagattcccttccagatcttgtctgcatacctcctcagtgccaaagtggttttcagttatctgtggctctgttcctctgctctgttgactttatccaatgaaaaccacaaaataaataaaacataattttattaacagattgggcctatgcctagccagggacttgaacaatgtttcatgtttatatttgatacatatactctttgttctccattataatttctctctgctataactaacacttttattcctagttataaaaatagaagtcaaaagacttctatttttgccattttatgttaattatttatcatgttctaaccaggtaaaggtggttctatcatgatcaattgtaaataactttgctgagatagtgtaattaaacataagaaaaatttcacattagacatatcaaatagatatctaatgagagaagaaaggtgatcagtcatcttctgagctaatcattttgtgaacgtattttaaattgcatttttaaattaacaagctgacaccataagaaactagaggacctgtttaattgctgaaataattattttggcacatagttgctaagcattgcacatgaacagcaaaaatggtagaagctttagtagctctttctgtcatttctggctcttcctagttcatcctctccccaacccctttgctgtctgtagagagacagcaggtgccatgcttctgctctgactctggaaccagactgtccgagttgaaatcccagctctgctatttaccagcttgagcacctataccactgctctgtgcctcagttcccccatctgtaaaatgaggactgtaattgtaataacttcatagggttgtcacatgcatttaaggaaagtacctggaagaatgccagatgcatcacaagcacttactaagtgttagctgttgttatcattgtcattactaggcagacttcttggtggcttggtaatgctgctctgtatagtcagatattatttctgggacatctatggatatagtcttgattgttgtgaccatttgcaatgtgttatgtagaatctgccaataaaaaagaatactatgagcactcccttgggaccaagcactatgtaagcactgtaagggatccaaagacatagaagaccacatctttccctcaagcagtttatggtctagttgtagagatgaggcctgtgtagggaaagctaaatagcaatgcaagaactaatatagagtaaggccacaatctatgatatacataagaagcacatataggctgggcacagtggctcacacctgtagccccagcagtttgggaggctgagctgagaggaagatgtgagcacaagagttcaagaccagcctgagcaacacagcaagactctgtctctacaaaaaaattaaaaataaaaaaaactggctaggcatggtggtgtttgcctgaagtcccaactactcggaaggctgaagcaggaggattgcttgagcccaggagttcaaggctcctggtgagctatgatggtgccactgcattccagcctggcaacagagcaagacccctgtctcaaaaaaaaagaaaaaagaagcacatatccactagacagcatacctaggtggtctaaaggagagttggcctagcaaggtttcattgaggaggaaccaaccgtgggctggagctgaggaaggattttcccagtcaaggtggctgggagggcattctgtgctgaggaagaaggagaacaaggaatggcagaggcaaaagcccagaaaaagggcagtcttggttgtatttaggggacagcacataactcagtttgattgaagcaaagggtcactttctgtggctagtggaagatgagggtagacaggcacaccatcctcaaatttttaaggactccattatgccaaggtttttattataaacgtattttacttgttctcttgaaagaatcagggaacaatgtattggcactgcttcagcctgaatattgcatttcggaagaacatatgttagaatccaggcctgcaaggtttttagttctgttcatacagacatttctgagctcttggaaaagaatttagtttcagccttgggtgagcatgatgagggggcataacgtgagctggggcaggcctgccaggaaggaggggcaggtcgtgccccatgccagcacaagaaaaggccatggtaacactagaggctgtagatgttaaagttcaatcttcaaagtgaataaaaatatgaagtgttaggaggaaaataatcattggttaaggtttgcttttgagaaatcatcttgtttgccattcaacttctgttcctaatttcatcatgagatacagtggctgctcagatgatgagggtgaacatttgatctcaagacacacatacattttttaatccatatccttttagatattttggctacacaattttaactgcaagttttttaatgataatgcacgatccagtattggggttagtgaattggtttctgattacatttaaaaccttttcctcttgataacactaagaacaaactggcattcatttgtccaatatacacttaccaatcaatacatttaagatgatgtcttattcaaagcttcctcttctacccactaaagataatttgagacaatgtctctgcgttaacaaatatattttcttaaacaataaaaaaggcttttcaaaaatatctagagtatataagtgacaccttcccccactgaagtagttaaagccatttctggagctttttatgtttaggttaaaaagcagctttatatgaatgttccttttaggctcaaattatcttttagaggattctaatattattatctcagttgtgaaatgttgctagtcgtgaactaattctgtccacttttcaccattgatacattcatgctcatttttattttaatacgtggccccagtattagagctgggcatttaaaatgaaaattccacctgggggaggacaagctgttattgcatccttacgatgcctgagtttcggttctgttatacacaggcagtaagcgaaaatttttgtttagctaaatcttccagtcctgtgatgaaatgcgcaagtggtagggctgtgttaaaacccaatttgcatcaagatgattcagatttttttttatttgtttgtttagatcttaatcatgtcccagtaactgctgcccttcctcagctcacagaaaacgcctggctcgaagccatgttgtagatagggccctgacacagcacctggcttggggcaggtccctcgtgcgtgcttgggaataaccattgctgaatgtcttcacttgtattggatctgagtatggcaaagcacagtcaaaagcagatatcgacacttaccaaatatgacacgtgggcagctttaatcagagaccacttgcgcatacaattctacagggaggccagtcactactgaacaaaaacgtagctcaggaaatctgaatttctgtgatttattgctgccagatgtatgagtatagggctggaccagctaactttcgtgaatgaggccgcctgctctttctaaagaacaactttttttcctcatatgcttctttgaggactcttatttctgacccccacccaactttaattttataatttcatctgcttgattttaatccatgcatgccctttatgtttacccctcaataaaatgaagttatcctctttttccccctctagccagataattaacttttggcccacactgatccagagatatttcttccttctcacccccatgcttctgaacattctcaacagaaagttgccaagataaataaaattgcaacacagtacatgcttctacatagaagattctctgcttttctcatctctacttttcttagtctcagacgtaaaatgaaaggtagacatacacccacttcagcagtcccccaaattccaaatttttagttgtactggaaaatacaataatttgggcaggcatacgagcattcacaataaatcgcagagttatgaataaatcttggttgtcaaaagcaagtgtgtagccgttccaaagcgtctgccattagaattcagcaaggcagctgtcagctgttttcttgtaattaaacagccaatgagcagctaattaagacatatgtgtatacagaagtggaagtgggtatgttaatgaactgtaggaatcaattcattaagtgaaaattgtcaaaagaccaaacatcagatcagcatttcagcctctgtttcactgagaaggagccccacacaggaggggacaactcagaatcagacccccgttcaccttcccagccacacccacagtgcagcgtccagccagcccatgaacttagacaaaactattaaaactccagtaggaagtgccaggcatatttccaggcttttaaaatttatctgacaaatgagtgctttcctacctgtatggaaacctggtatttgataccctataaaatgccatctccctcatctgaaccattgtagggaactcggactacagaaattgaaaagtgtttttttgcgtgtttgttttgttgtttgttcatcttttgttgttgttgttgttattcagtcggccctacatgtttgtcttggtgctttttaggtggtgtattaagaagtctatggcctttggaataagatacacctaggattcaggaattcaaatcctgggccctccccttacctgctctgtgactttgggcacacggcttaacctctcttaagtttaactttctcatttgtaaagcagatatacatatccctactttgccaattgtaggttgttgcggattgcaaataatgatggcaaagtgtccaacatggtgcctagtagggagcaggtgctcagcatatcgtcaccactgtttttatcactgccaccattttttcctctggttgttcaacaagtatttattgacttctctaagtattgggttagctactggaaacaaagaaacaaggcagtcaggccctggaaaaggtagacattaataatacaacaaggtaagggctaggagggggataaatacaggactcttaaaggtgcacatgggaggggcccctcaaccagctttgagagggcccaggtcagagaggttcccagagcaaccgaatgtcttctcagtgaatcctgaagggaaggagagagtttctttggggaactgtggagatagaagtttacgcttggtcattctatgactttgagaagagctgcccggacatgtggtcattgcctggtcatcagcagggagccattaagggctcatcagcagagaagtgacttgatcagtttgatgttttagaaagatatctttagtaactgtgtgaaatggattggagggaatgagaatggaagcaggggtcccaattggaaggttgtataataaccaactcaagaagtgaaagacatggaaacttaagaaaactgcagtaaagatggagacaagtagatggatctgagaaataggaaggtgccaagaagcagcctaacttggtgatgcttgaatatgggtggggaggaggcagagattaagtgaagcccatctttctgccttgagtaactgagggaaagatgatgcctgtcactgagcaagaaaacactggagaggacagctgggaaacaggctgtgggtcattctcttctaggtcgggtgcagtggctcatgcctgtaatcccggcattgtgggaggcctaggcagaaggatcacttaaagccaagagttcaagaccagtctgggcaacaaagcgagaccctgtctcctctacaaaaaatttaaaaattagccaggcatgatggcatacacctgtggtcccagctgctgagaaggctgaagtgggaggatcacttgagtccaggaagttgaagctgcagtgagccgtggtcactccattgcactccagcctgagtgacagagaccgtatctctaaatatatatattctgttccagaaagtcaatgggggctctagaaggccaaaccacaactttgggtgaatgcctatccaaagtcagggggaagcattgaaacaacgtgatggagagctggtgacacagcaaggatgaggctcaggccagccacatgctggtaagctgtgaacaactggctctctggaaagcaaaaagtgtctatctgtatgtagataactttggtatctatctcattgatataatttcacataattttcaaacaataataaaatatacaatattctttattttaaatttcatatagacaaatgattctcactgaatgctctcatgatttttgctgaactcctacatctatctgcatggttacaactgaggaaagactagttccaacatgaatgttggttgatattttgtttacattaatgactaagaagggagtgaaacaacgaagacattttggaacttcattcattcgccaacaatgacatgaaccacttccttgctgactcagttaatagttttcaaataccagaagaacatttcttccactttttatgttattcacaatgggagcactggatatgatgtactgttaagtttaatctgcattattataattttcatcagtttttttttttgtgttttttttttgaggcagagtctcgccctgttgcccaggctggagtgcagtggtgtgatctcggctcactgcaacctccgcctcctgggtagctaggattacaggcacctgtcaccaagcttggctaatttttgtgtttttagtagagacagggtttcaccatgttggtcaggctggtctcgaactcctgacctcgtgatctgcccacctcggcctcccaaagcgctgggattacaggtgtgagccaccacacctggtctttttttttttttttttttaagacacagggtctcactctgttgtccaggctggaatgcagtggtacaatcatagctcactgcaccctcaaactcctggctccaacaatcttcccacctcaccttcccaagtagctgggactacaagcacatgccactacacctggctaattgttttatttcctgtagagacagggtctatgttgcccaggctggtctcgaacacctggcctcaagtgatcctcctgcctcagcctctcaaagtattgggattacaggcatgagccactgcattgggccatcaccttcctgcctcagcctctcaaagtattgggattacaggcatgagccactgcattgggccatcactttttaaatctagacaataaagcaaaataataaatcaaaccctgatctgtaacatttgccaatttctgtggtgtaaataatcccaccaatggccattttcaagccacccgacccgctctttcacagaatacagagtagggaagggatgcacagcatggtatagtatttccaccttcagatataaggataattgatgtagacaacctgaagaacattgataacagtaaaataatcattaaaaagtagttaattttttatgtcaggaatgcatcagttaatgtgtaataacagatttaataactagccttaataacaaaattcctgacattttagcactcagctcttgcaacctggtatgagccttctcctaaacaccatggcctctgtcccagtttgccaagcgcccatctaatgggatcagtgaaaaattcatagtatacagtcattttttttaaagaaaaagtattagggaatagaatttccagagaaggtaagacacgtatcagaaataaaagcacaaggcgttttgaaaagctaggtgaaataagggaggaacactggagagatgtctttgagacagtaggaattgaaacaaaaggtggatatgtagggactctgtgtcaggaaatcgagaatgtgtgacattgttttgtttgtcccacaatgaagaagatacatataagtaagagggcactggacttaaaatcaggacaagagattgagtcccagccatgggaccttggacaagtcatttaacattctaaacttcatttttgtttttggcaaatcagaaaactcgaatcaatctctggttcttaacaaaaggaagtcaaagtcttcggggagcttttaaaaaatatttactataaaaatgacaattgtggccaggtacggtggctcacgcctgtaaatccgagcactttgggaggccgaggcaggcgaatcacggggtcaagagatctagaccatgctagccaacatggtgaaaccctgtctctactaaaaatacaaaaattagctcggtgtggtggtgcacgcctgtagtcccagctactcgggaggctgaggcaggagaatcacttgaacccaggaggcagaggttgcagtgacccgaggtaatgccactgcactccagcctggtgacggaccaagactccgtctcaaaaaaaaaaaaatgacaatttttttcttttttgacttataaaaatgggaatttctcattgttcaaactactatgtatgcctggacgacatcgccaaaagtttctggtttgatatatagttctggtttgatatatctaaggtgtatcttttaaaagctctgtgggtgtttctgatgcatcacctatatgtcaactgctgtacctgataatctctcaaagtctttcagcaccaaaggcctgtttgttttattctaattttctatttgcaatagctgcatggtaatctgctgccactaggtggtggtagtgcgccacagtcacactaaacgtatactacctgaaatgtatcatggtggctctctggctcaagctcaccatgtttgtaaatgaacatctccatgtattttaacatccataaaaagtgaacttttatgacagccaagtaatttgttagcttatcttttagaaataacaaaattgccaaattatgtacttgatacctttcccagctcacaacttcagcactttttttttacgcctcctcagttccacccaaaactccatgccctagttttgtgcttcccctgctctctgtatgacctccaatccctggaattcatctctcagctcactcacttcctaatccttttgcaggatttctccccaatcagacaaaatctatctctgtacttagaaacacactacttctaccttgaggtaggaaggtacctaccacactttctacttttcttcttcctctttctaatccttcttcctcttatgtgttatttaactcttagtatcttatctgtttaattttccaaacccttaatcctctgagaaccccgccccccaaggaatactgaaaagaagaggtttttaaaaagaaaaagaagcaacccaaaccctcattcttcctgaaatgcaaagttcagtattcgtctgagtcatggaggtttactcaccctgtttctcccttctcagctctcaccttataaccccacttcacctctcgcatctgatatttgatagttctccttgtgggtatgactctgttgacttaatccaaaagaaagatcgcctttctggttcttagctatgccactcccagaacttttcagcaggcatttgttcagctgacttagttgaggtataaatgatgctgtagagaataaggtgtgtctgcttgcgtgcctgctttccccaaatcctcaaaactgagacttccaaataagggtaatcctcttccaagcagagagtgtggaagctggacattggttcgagccacagtgccactgctcaaagaacatacggaatgcttcatgagtttgccttgcaacttatggcataattacacagacatctttaatgatagttattctgtgcccttgcagtaagtttcattgtttgtttgtttgtttgtttgtttgtttaaatgagctagagtgatttagaaataaggtgaagcaaatggggcagaatacttctggtcagaaatgaggaaaaatgatggactcatgagactgattttcttatgtgactcctaatccagatcaggaggcaactccagagagagatttttgtaaaatgtctgggcggtaggaagctgggtcagctaaaggtgctaaagtgagggaaaacactaatttcagagtagattgctcttgctactttattctgcataacttgttttttacactgcctaatttaatggttgccccatatgagaacaactaaggaggaattcttttgacacacaagagaagcagaaaaacaaaacaagatgacagtgtaagttctggagttaaactatgtgaagtcatatcctggctttaccccatgctacagcgaggactctgagcaagtcactacacctctctaagcctctgttttttcagccttaaaaccaggggaatgataggatttgcccaatattgcccttgtcacaagtgaatgacacaatccacataaagcatagagtgcctagtatgaagtcagtgctgttttaatggtatttgggatttgttttaatcaggtaccataagacacacagatctggaaatgactgtcatgaaggaagaagtttgttacacagtagtccccccttagcctcatggggatgcctgaaactgcgaaccttttagatactgttttctcccatacatccagacctgtgataaagttgaacttataaattaggcacaatgagagattaacaacaataataataatacagaacaattattaaaatatactgtaataaaagttatgtgaatgtggtctctctttgcttcccttctctctctcaaaatatcttaatattcttttactgcagttgacgcaagtaactgaaacgaggaaagcaaaacgacgattaaggagggagtgctggactcacaaatccctagagacagggcccatgccacaccatacaggggacacatggggaagcgccagggtcagtgaaggggagagggatgtggggaaacactgccaagagcctccatggtgttttccacaggaaggaaggtgcagcaggatgagcaggattaggataagtagctagtctgaatcattacagacggcgctaggaggtaggggctgtccctaattgtcttgtacctagccctagggtgaccagggcaggggaatcatggcgagaagcgtaagggcctgatgaagaaggtgtgctgggtgtgggctctagcccacttggttttgtgtgagaggtggctgacagcaggttgtttgctgtatgtaggagttatccagccctgcaagggcagtccctccagtgtctgcaaagcccgaagatgtctgcatccaaaatacagaataaaaagatatggttactacaagtactcagtaagactgataatctgtcatcatcatcctcatgcccttaaagcagagctaactgatgattaatatatgcttctatgttaacagtcttggactttattaatggtgggtggaagttaacttaatgtatgtatgcaaactaaaaagtggcatccttttcattaatgacccaaccattattcaagagctatgtctagttagggacttcagacttttgaaagaaatgaagaaataatgccagatacatgggctcgcacttggaatcccagctacttgggggaccgaggtgggaggaccgcttgagcccaggagttcgagaccagcctgggcaacatagcgaaaccctgcctcagttttaaaaaagaaaaaaagaagtagtgaagaaattggaaaggattctgagaagaaatatgcaaggtggaaaagagcctagaaagaaaggtgacagatgctgggatttggtcgtcagaagagatatctaggaaatagcatggcagccctcaagtactagctccacttaaagaaaaaaagaagagatcattcagacattcctcatattcggtgatcacacaagaaactgtagcaggcttaatgtgaagcaaacaaaactcaacttcagctaaagcaaaaacaaatacattcctgattttaagcatccacagtgatgcctttacacaagggtatgaacggtgggagagtctcaagaaagagataaacacctttcagcttggacagagattatgtgtctcaggggaaaatgaatacctagacagctgacctcttggtatctctttctaaggattatctgcctctgtgaccatttatattttcttgaattctctctagtaagcccccaaagaaagccttacttcttcttacttccttttcacaggggaaacagacacacacaaacaataaaataaaataaaataaaaaacatagctttagatatttttcagaagagagagattgctttacagaagaggcgggacttgatcaagggtagagttaaagtacaacagagagacagtctgagacatgaggcccccagccttgcccatgtcaaggttagcaagcaccttggctgaaagcaagaggagtgagaagtcagggtcctgccctgtcccatcccaggttggattttccaaagaactggaaactgaggtcatatacatcaacttggttgacaaaggcccccagccattacaaaggaaggcaggtgcacttcttctcaagctgcccaccataacttcccatctgcctattgtaggggggaaaaaaaaaaaaagcacagatgaacaaaaagaaaaataaaatctgattggccccaccaactactgccaacaatttggggcataattttccaaatcttcttttatagtaaatatatgggtgtcctttttttccacaaaacttggattatactatgtttagctctttagttccttttttaaacattcaatggtatatttttatcaccttttatatcaataattatatttctgaaataccatttgtagtggttgaatcccattgtatgagtatacaatatgactcttttaattcagtaatgttggacagttaggatctttctacattctctatattatagatagtactgtgaagaacacccttgtaggaaaatctttgtagcattctaaatatttctttaacgtgtattccttaaaagcctagctcagtgggtaggctttttaaaaatttttgatacaactgccaaattgacctccagaaaaatcgttcagtgggagagcacccttatcagtttgcctaccactctgttaattctttaggattttacctctccccactagtgtcgccctcattggggtcatctatcttcacaactaaagctttgaaggtaataattctcttttgtacccttcatggctttgcttcatggaaatgactctacttaccttattttttttctgcatacatccctagcttgcaaagccactgaaagataaatgagcaataaaaagataaaaaggtggatcatgcctgtaatcccaacactttgggactccaaggtgggagaatcacttaaggccaggagttcaagacaggcctggacaacacagcgagacccccatctcgaccaaaaaaaatatataaatatatatatataaatatatatatataaatatatatataaatatatatatataaatatatatataaatatatatataaatatatatataaatatatatataaatatatatatataaatatatataaatatatttaatataatatatataatataatatataaatatatataaatatatataaataaatatatataaatatatataaatatatataaatatataaatatatataaatatataaatatatataaatatatataaatatatataaatatatataaatatataaatatatataaatataaatatataaatatatataaatatatatataaatatatatataaatacaatatatataaatatatatatgtatgtatgtatgtataattagccaggcatggtggtgtgcacctacagtcccagctactcaggaggctgaggcaggaggatggcttgagccgaggagtctggcctgggtgacagagcaagaccctgccccctcccccgaaaaaaagcccccatgtgtttggaaattaagaaatatgcctctaaatcacatctggattgaagaagaaatctattgaaagttagaacatgtttttcactgaatgagaatgaaaatactacgtagtaaagcttttgggttgctgttaaaacatcactaaaaggaaaacttgacactctaagaataaacagtgaaaatcagctaagaatacagctcaggaagttagcaaaaacaaacaaaaataaagttattgaggtcagtagctccttatacatctttgtatcccctctcatttcccaaacagcacttgacacgagaggaacttgatgagcattggactggatttgttccatctttaaaggccatggttctgaacatgtggtatttctaaactgccagggatgagggaatattcccaatctgatctgccaaaataatccctccaagtgttatctaatgcttgcgatagcagattcagacttggggagtgagaaacgcctaaagggccgtgtgttgaagtgggctagtgaagattaccatggttcaccaggttcacagtgccctaggttgtggtgtggctgcattttccttaacttggatattccagggaagtgttttgtatttattttacaaacaatctcttagagataaaggctaaaggtaagtccttttgtatcattccatcaggcacattgcttttgatcatcagaagccaagaacaaggacctggtcctgtgcctttttacatgggcaactgtctgttgaagttaaagaaagttttgcaggtataagggatggaggattaggctctggggatcaattttactcaaggaaaaagaagtgactttaatttcattaatggtctcctggatgattctgctacaagtttaattctccattaaatattaatgccactcagtgcttagcatcctgcctttagtatcataccactcattctgacactaacctgttttatattttataaccatatcacagggctttttcaggagaagtcagcaaagcaatgccacctactcctgtcctcgtcagaagaactgtttgattgatcgaaccagtagaaaccgctgccaacactgtcgattacagaaatgccttgccgtagggatgtctcgagatggtgagctctcacagcttgagttgtacagttgcacggggttgtgaaagtgccttctgaaacctggactcagatctgccaatatctgccccgcctgccccctcctcattattccaccttacgccccgccccccatgctcctctggcagctacatggaactcacagcagctgcttcctcctcctcctcatcctcagagtcagctggctggctgatgggtgggggtggtgtggaggagaagtgtcttgtgctcagaacaccttcagatttttgatatttcagccattataggtgggtcgattgactgacggtaagtgtcatctgaaggccttaataaagatgtctcctctaggcattttcccctgcaggaaatgtgaaccacaactgttacttgctttacactagtaagtctattggaggttgggatgaagccgcttttatgctaactggatattttgaatcacatgccaaagccaaatatttgtacatacagaatgtgtgaaaatagtgcaaagcatggctcaatgacaagtgttcttttcattaaatgaagctactttaaggaatagagaccgtctaccattcaagtacaaaacatttcaagatcttcctggaaaactatcttaagtgcactgaataatcaacaccagatttcaagacagttatgcttatacgtggaaactgggcagaaagcacagcgggtccattttaaggatttttccaaatataccagctggctctcttaagagatccctttgaaggaaaatgtctcctccagtggaatttcagcctgtggaaaaatacttcagaatgcggagcaggctttccaacagtctgccttccccataatctgatgttcttagcgcctgtagatctacataggcacgagttcacttttgttcctgcgtattctaagaggcactctgtgcaccactacaaaagtgaagcttttgacattggaagatacaaatcacagaacttccaccatattctcagaaattcctgtgacatgcaactctgcagatttcatcttccgatggtactaaactgacaaagttaggtatatctcatcaatttgtaagtttaaatcacaagttgtgtgtgcattttctcaagagctggtccctttatttcacttacaggatataattactgtcgttaatattaatacaaaagttaaatcataattgcggagtcacagcagaaagtttcacctgtgggtattaggccccttgagtgtcctagaaaatttttttcaaaaaaattaagcaccttcagtatgccttctgaaaattttgcatataagaaatagcacaagttgttgtaggcatagaaagaattctggaggttaagaaattatggttctgaaattcagatcccacatcagcctggttgctgcctgagcagccccacccaagtttcttatctgagttgtggaaactggaaagtgaccagtattccagctcacctgtttcctctgtgaacaaggacagcgcgtcctctttggcaagaaaagaattcaccacctggccactgtgagggccttggttcccaacttcgtgtccatctatcctgcctcctgccctagactcttataactacgatcatagtcaaatgggtgaatgcatccaccccatcagctataaatttaaccacaatcaattaggagaactaagtccctccagcaaagactgagtctagctgaaaaataagtgagttcatggaagaattcagaccaggaaatcatagggttttttgtttgtgtgtttttgttttcagttatcttggtgtttcacaagaattcatttgatattctgaatgaattggaaagttattcattatagtgactgctccactttaaatatggggacacatcccaaagagaagcattacaaacagaaatctgcccaacaaggatcatacattataaggatcttatattataataccatatttgtcctttccaaatcctgatgctgtgattacttgaggctaaatgggaacagcagaaagtgtttaaagatgggtcctactgggagtggtagctcacacttgtaatcccagcactttgggaggatgaggctggaggattgcttgagccctggagttccagacctcaagccagggcaacatagcgaaactccatctctacataaagtgaaaaaattagctgggtgtggtggtgtacacacgtggtcccagctacgtaggaggccaaggcgggaggatcgctcaaaccttaggaggttgaggctgcagtgagccatgttcacatcactgcacttcagcctgggtgacagagagcaagactctgtctcaaaataactaactaaataaataaaaataaagatgggtctcagggttccacaggggctgccatgacccatgacccatgactggaggagggggcttcttaggtcaggtactctgatgtaattcaaagaattacagaggcctcatccagttcattcagacctcacaatgaagctgcagaagtggccatttgatcagggagaactgtcggagcgtacaagacggtgaactgaatgaacgctgaggtttgactgcttattccttgatgaaccctgtgagtctttgcttccctgtgccttggtctgaacgtgggagagaaagaggtagcctaagccagctgcacggggggagagtgaacaagcccattaagttatcagtggggcgcagtggaaacgggggatgtgacagcagggaaacagaagtggcatctctctgggcccctcctacctgcaccaggcctctttctgaaacatgagtttctctgggatgtgtgtttgctgttggggagctggagcgagtctgtgtgggttggaactgttttcacctctgaatatgtccttattttgtggtcatgcagttttggattgagattgtgtgagacttcaaaggaaaccccaaagctcgcaggagagaatattgaagaaaagcgcattgtatgtagtatggtttggcttttttcttccagctgtaaaatttggccgaatgtcaaaaaagcagagagacagcttgtatgcagaagtacagaaacaccggatgcagcagcagcagcgcgaccaccagcagcagcctggagaggctgagccgctgacgcccacctacaacatctcggccaacgggctgacggaacttcacgacgacctcagtaactacattgacgggcacacccctgaggggagtaaggcagactccgccgtcagcagcttctacctggacatacagccttccccagaccagtcaggtcttgatatcaatggaatcaaaccagaaccaatatgtgactacacaccagcatcaggcttctttccctactgttcgttcaccaacggcgagacttccccaactgtgtccatggcagaattaggtaatggcatgcatgcttctcctgggatgctctattcatgccctttgaagtaaaaggggtatgtctgactttcctctaatgagttctgctaaatgatgcaattcacctttaccatttgggccacttaattttctgccctgcccccttgcttttgaccctctgctgtttcccatggtttatccaatacatgcattgacctctcagcattagaaatggggcaaaaccaacggaagcagtctttgaattctgcagaaaactgtaagttcaggaaatggctacattaacttcattagtggtttactttagttatattccaaggattgctttatacctaaggtgacaaaaaaaaaaatggcagtccacaaactgaacttggcccacagacatatttttttgcccagggcagagttttaaaatttttgaatcagttgctaatatttaaatttggataattatacccaaaagttcagcttttttagcttcttgtgggaggggaaaaaatgatctatttacactgagccaacatttgtgaatgtcaacagccaactggcaacagccaggggattacacctttcaatgggcccacctgactcccgccatttatatcatatgcacagcccctgtaggcatctcatttttgcaactctgatatatagtataaatgttcaacagaaatcagcttctttacttaccaaaatgttctgatgatggatattggtgacaaaattgatgtaattcatataaggctcaccatgcaaaagacaaaaaactgtccttttcttattgctggaacattactgcttcttgggagatgtgacctagaaatgttgataacacagacaatgggcaactttccatttcgaggaagttgtgttaacatccgctgctatatttaatcgatttttaagtacagcactattattagaaaaactttgataagaacctttgtagtttttaaatttgatctgctcctcctggtggttcctcacacaaggttataatcctttgggatatgtcaattagttgctgtggagatgactaagttaatacaaggagagaatgaagacttcagacggaaaagaaacagcaggttcagacttgagcacagaaatcctcagttcacagaaataatggctgtgttctttagacggtttctctacctctgcaccccataaaacatcttttaagtgaaaatttatatttccagtaaaatctttctccaaatagaacaaattgaatgttctttacggtttttacacaagcatctctttatgggtctaaatttaaatcctcaagagcagggacattttaagcctggtctttaaccactgaacagcattaaaaggtgtattgcagctcttttgattaacagagaaacctctgaactagaagccaagctgagcagaggtaggtttgatttttttttttttttcttgaactagaacaaaaaccttccatttttgtcatgaaatcttggttggctgagccttaagcagaactgtaatgaaagtacaattttcagatatgaataaggatttgattgaaagctgacatgataccatgaaaaatgacctgactcactttaggtttgcctccaccttaccataaatactagtgactctgtcctgtttgcttgtcaaatattcaatcctgaaataaatccataggccttaggcaaagcgtgcccttgaacatggcactttggctaaaaaatgcactcataccgaagtggggccagaaatggctgagccgattccctgaggctcccggacaagtcagcttcctcttccatggtctcactttccagtgcagtctgggagccctgccccctcatgcttgctctatgtgcttttaaattagggatttttcacaggtgttgtggtatttaccaagataaattaaatgagatcatcactaggagaattcccaaacccaaaactaaactagcatttatctggaaagtatataattgggctctaattctcttatcccatttatacatgcaaagtgtttcagggagctaagagtatcatgaaagtggcccaagtcttgttgctgcttctccaaagctacttaaatttccctggtatttcttttggggcttaaagcctgctatctctttaactaagactcttgacttcattttaggctaaactttgtcatcagattttaaacaagtgaaaccaattgtataataggaaaataaattataaaccaacacatcctaagtccaattctctctttcaagtgtagtatgcacaacctattacttttagtgaaaaatatgacttcatccttggctaggaaattttgcccttggtgtacaattagtacctgaattagacattccagataaacgacctaggttttaagtgcaaattaggtttgttactataattgatatctaaagctttgcgcaggagaaacagctgatatactgggcaaagcatgagacaagaaatccgcttatatgggttgtggtcctggcattaatataagttatacaacccagtatacaccacgtaacatctgcgagctgtagtttctctactcctagaatataaaggtctgtgtctgaatcatagctctgctacttgccagctgtgacaccttgaagaagtcacttcactgtggttcagtttcctcctctgtaaaatggagataatactagtacctttctcttggggttgttataaggattaagtgagaaaacatacatattcaggatagacacaaattatgtgggactggcatatagtgaatgctatatgtgttaactgctatcataattattaatgtcattattatttgttaaacaaggacagtttggaccagatgctatctaaagttccttcccactatgaaaatctgtgactaactcagaagcgaggacttcccatctgaagtatcgaggcgctggctgtattgctgaagcagtcatggttggggcacatgacttgccccagtcacaaagtgaggtagactatagattatctgctgagctcagacagaagccaggtctcctaactcctagcccaaggtatttcactattccagactttatctgagagaccacgcttaaattctcgaattttattcagcctgaccatactcgcctttgctgaaatggagatttaaaaatagcaaagtgtctaaaatcttacacttgccaaatcgactatgaattggaatgaaaggctgttggtgagcagatggtgtgaatgcaaccactgccctctactggtatgtcaggtacactgcatgatttgttgtctcactttttattggctgttttaaataggtagggataagtggccacagtttcttaagacaaagtgaaaccacaagatgctaagtatcttattaactagaaatgaaacataacctggaaggaaatgatatgagcctcttctcatccttcactccacagcatccccccctacttccctgcgaagactcttcatcttcatcatttttttatcggcaaaaattggtttacattctagaaacgaccttatatagtgagagttctttccaaaagaggtagttcactaccttatttatgtattttcttgtttcttactccccattatttttgtctttactcacctattctccagcgtcattgattctaagacatgtaatttactggcttctctctctcactctcagtttctcattctttcctttacatttgttcttttatttgtgttttattttttatgttatttattcatgctgttttagtgtctatgtgttgccaagtagggccattcaggtttattatgtttcagtgtctctaaggagattctggtttccagctccatttaggtgaacctgctctgttttcacacaaacaagtctgcttctgtttgacaaaagcagtaacaaatttccaaacaaaaagatattctccctagtgttgccaagtttgcattcagcaccgttcttttaaaatgacttgcctattctatactcaaaaccctagggagagggatcattttttgatatggttttatattcatgggattttgtcaattcttttaaaaaatacttctttaatcatccttcccttccagaacaattattaccaagctgctccaaattgttagttcctggcatctagattctagcagccttctatgtggtcctcctgcctgagcttctctgtgctccaatacaccaagcacaaaactgcttgttccatttccccagatataattttctttttttttttttaagagggagtctcgctctattgcccaggctggagtgcagtggtgtgatctcggctcactgcaacctccagctttcaggttcaagcgattctcctgcttcagcctcccaagtagctgggattacaagcacccgccaccacgcccagctaatttttgtattttcagtagagacagggtttcatgatgttggccaggctggtctcgaactcttgacctcaggtgatccacctgcctcagcctctcaagtagctgggatcacagacagccaacaccacgccaatttttttttgtatttttaatagagacagggtttcaccatgttggccaggctggtcttgaactcctgacctcaagtggtctgcccagctcagcctcccaaagtgctgggattacaggcgtgagccaccacacccagccaatctcttccttttctgacagcttcaattacttttttctttctcttcttctgtaattcaactttataccttattatctagacttgaattgtccttccagtgtgttcatacgtgttcaccagattacaagctcctagagaaaacttctttggcctctaggtctttcatatcttcaaactccttatgctcaagtataataataactaatattctgtagcacattctaagtaatcctccccattctaagggctcaactcttttaattctcatggcagccctgtgaaataggtaccatttccctcattttacaaatgaggaaaccaagcacaaagaggttaaataacatacccgagatcacacagctagtaagcagcagagctgagatacagactcaaatggtctagctccagagtatgtggcttcacaactacactatgcatagccacatggtaggccctcagtaatgcttgttctgcaatttgcaggaaaaacaaaagaaatacctagttgtcaccataaaagaatatcattttctagtttttcaagaataagaataatccttcccaggtcaatgttatgtggcagatgtgtcttcataaaaatgccaagaagaagcaccacgtcaatcatttcctatgtctatctaggtcaatattttttcattcctagacattggtataaaggcacagaacaagggcaaagtcaggagggtctttgaagtcagcaggtcttatcttcaaatgctggctttgcaaagtccctgtcctccttcacgttcccaaatacaaaacagttccaaattacttgtttaaatgtgtaaagacagtcaaaactcgcacagcacattgttttctacttgttatttcttaaagcaaatattaaatcaccaattattcaaagaacttcgcttttcgtgtttgtgatctcccgttttctccttagaacaccttgcacagaatatatctaaatcgcatctggaaacctgccaatacttgagagaagagctccagcagataacgtggcagacctttttacaggaagaaattgagaactatcaaaacaaggtatgatctgaggaatttttcctcctaggattgaggcaatattgggaagggtgttggtataggaaagttggtcaagagttcacacagactaaagaatgaatgtcatcaggtttctgtttaaatatcttttttctgaagctactaatgtacttgaggctttgccatttaactcagatgcaaaatttcagcaatagcaaataatttctattgtgctttctaggtatacacatacctccttccatttgtcaacaggagaatagattaagcagcttccaaaagtctaaatgaattgagaattgtctcaatatcacaatcaagattttaaggtctggaagtttatgtaaaataatctcagcctaatgtttctggaagttgacaaggaagcctcatgtttctggaagttgtattagggagtatatacaaaaaaaatttagaagctgtgatcataactccagtctgaacctagcaatatgaggctgacaaatagtaccctacttgcctttttctgtaaaacacccagatcaacaagattatctaagtgaatccattttacatttgaggaaaactaacatccactggcatgtctggagagtgaaacatcaagaccagaccttgactcctggctcctaattcagtgtttcttccaccccatcatatcggtgggaacagtctgaaactaagattggggaaacaagttagcaacgaaaaagatccagaccattctgtaactgaaatggagagtgcgaatataaaaggaatttaacaggacatgttggggaatagcaacacattgctttgtttgcctttgaggtagcaggtaatgccagcagccaaagctacaaaggagaagcaagaaaacagtaagaagcaacaaagtatatgaaataggattttagagtcagagatgcttggatttgaatcctggctcccatatccaccagttttttgttttgttttgttttgagacagtctcactctgtcgccaagctgacacttgcactggcgcaatctcggctcactgcaacctccgcctcccgggttcaagtaattcttctgcctcagcttcccaagtagctgggagtaccggtgtgtaccaccacgcctggctaatttttgtatttttggtaggaacagggtttcaccatgttagccaggctggtcttgaactccagacctcaagtgatccccctgcctcggcctcccaaagtgctgggtttacaggcgtgaaccaccgtgcccagccagaaaaaatattcttatgaaagtgaattaaaacaaggatgtcataaagcgcctagctcatagtaggtgcacaataaattcagttgattctccttttctcccttcccccaaagtaaagtggtgttaaatttcccaaggcaaaataattacttaaaagaagatccagaccgggcacggtggctcatccctgtaatcccagcactttgggaggcccaggcagacaacacttgaggtccggagttcaagaccagcctggccaacatggtgaaactctgtctctattaaacatacagaaattagctgggtgtggtggcaggtgcctctaatcccagctactcaggaggctgaggcaggacaatcacttgaacccaggaggcagaggttgcagtgagctgagattgttccactgcactccagcctgggtgacagagcgagactccatctcaaaaataaaataaaataaaataagatcccactttgccactcttcgtggcccagggctaaagcagtggcatgctttgctttcataactctgcagcttctgctacaaaagctaacatcttcctggaggatgttaatgtgtttccctctttaacagcagcgggaggtgatgtggcaattgtgtgccatcaaaattacagaagctatacagtatgtggtggagtttgccaaacgcattgatggatttatggaactgtgtcaaaatgatcaaattgtgcttctaaaagcaggtatgtgctttgcaagtgaattttgagatctcttcctaacctgctttcacccgcttattaaagaaatgcttggtaaggaaggtgtcgggaacagtttttctccaatgataatagctcaggtttttcttagcagaaatggagttcttttcaaaggttttaagatatattcaggaaacattccccccacttttcttctcttctgggtgaaaagattaatttgaaggtcacctacattcccaaattttcccatcacgtgtgttttgtttctacactccaagtcctccgagtttatgatgttaggaagaagaaagtagaactcagaaagatatacttgtttttgattcttggttttagtacatatgaataaatgctttcctagcaactctgagactctgcattgcgaggtagaagagtgctaaggaagtaatttataaatcaaccctcacttcagttaaacagggcttagcttcagcacaacagtcttttaattacatagaaaactctgcccttttggatagacagctgatgtgactgagaacccgctagctaaactgcacacgacacccaccatgctgttgcagaaggagtctctacatgagcagcttagaaacaaactcactaacatcagatgacccaaatgacccaaaccatttctgcctctgcttaggttctctagaggtggtgtttatcagaatgtgccgtgcctttgactctcagaacaacaccgtgtactttgatgggaagtatgccagccccgacgtcttcaaatccttaggtaaggggatatcaaggtgccttttcttcaaatcagggctataggaaaagatgcgggttgagtgaaagctctgcttggacaaaatgaaaactttatttagaaacaaaaattaaggggttttatacctattttactttctagttagtcactgtagaaaagtcatatagctcaaaagttttttgtctacattacttgtaaagatgtagagtttcattttatctagttggtaatcaaagggatttatatgacgtgtccttccagttcccttccagattttaagaaaccagatttgctggtgatatattattcggatgacctttaggatgtgagctgatacataaaattaagcaaagggcaaaagctttgcccttccatccccctcaaacagtaaccattaatgagactgaaatgcagatatcaaagaaataaaagttacagttaagtgaaaccatgatatataatttataataaataatttggggccaggtgcggtgactcatgcctgtaatagcagcactttgggaggccaaggcaggcggatcacctgaggtcaggagtttgagaccagtctggccaacatggcaaagcccatctctactaaaaatacaaaaattagctgggcatggtggcacacgcctgtagtcccagctactcaggaggctgaggcaggagaatcacttgaaaccgggaggtggaggtttaactgagctgagatcatgccactgcaccccagcctgggtgacagattgagactctgtctcagaataattaataataaattttggatttctataatttaaataaaatgaacatagttattaagaagaatggataagtatctaaaatgagtgatttttttaaaagttatatgacagatgatatatataatgaactgtcatgtagcacattgtcatttaaatatatacatttatatgtaaaatatgcaaatctgaaggaatagacaccaaacttaaccagtcttttggaaaacggattattattctaggggactttcacattctgtgttttcaggttggtaaatagttataatagttttaccaccagaatatgtcatttgttaacatttttaaggatgtttcagatgaaatagagttgaaaacaaaaatgagttaatttaacatatcagttagaatatggctattagactctataggttaaaagtgtaggctctgaaatcagtcagcctagctttgcttcttcttaggctgtactttctacctgtgtgaccttaggtgcattactttcctctccaagtctcagtttccttacctctaaaattgggataataataatccctccttcatagagctgttttaaaataagaagaaacccaaagaaataccttagagcaatacttgccacagtagtcacacaacaaaagttcaatctcattattttcaatgaggatgacagtggcaatggtgatgtgatggaagtggtggtgatgactaaacagatttttcttttaagattttaaactattatactgtagaaatgttactactattccttctgatcttcaaccactagatctctcttcaccttccccatgtttttctcctaagaccttctattggacttaggagaaccttaggaaaacctaagacctaggtttttctcctaagacaataatcaaaattctaaactgtctttgttttcattttggcaggttgtgaagactttattagctttgtgtttgaatttggaaagagtttatgttctatgcacctgactgaagatgaaattgcattattttctgcatttgtactgatgtcagcaggtaagacaaccaaataaaaataaaaatggttttcgaattgtctaagataaagaatttttacaaggcccatacgtttaatagctataaaatatttgggagctactaagagaggtctccacccttattaaattggattttaagtcttcaaataacaccctctcttttccacccatccaacacaaacatatattcttttgagaaaacctcatgcctttcagacaaaatgtaaagaaatgagaattgaacaaaatccagtccagaattaacctcctgataccaagagaaatgctgtggtggaatagggttgcctgtcttaacaccagtctccaggataacaagatttttaagacatcctatttttttgttaaaatccatttagatgtcatccactagattatctgaatttaatctgtgttttcaaccagtagtgcatgtttggggataatcacttttgctaagttactaccttctatttggaagacttagacataaagactttatcctaaattaacaacccttaagtcagttggaattctattgacaattttagttgacaaagattacaagaaaactttcctatttttcaaaaaagctagcaggatcgataatgaatatttcattccaaagtataattattagaacgtctcgaggggccatgatggtttcatttgcactcatatgagtatggcctcatatttaattgtttatcctttggaaggggaggatccttcctttaagtattggtaaaaatggaaaggtttaacaccctgttttataacttccttggatcacttttcactccattaggagaaattttgaaagaggagtgaaactggcctctgagtctctaaatattcattgtgatataattatccgtatcaaaagaatccggagaagaaggatcctgacaccatgtcagaggaatgctaaagaatatcatttttttatgcttagatcgctcatggctgcaagaaaaggtaaaaattgaaaaactgcaacagaaaattcagctagctcttcaacacgtcctacagaagaatcaccgagaagatggaatactaacaaaggtgagtgccaaaggcttctagttggcatggcctgaactatcccctggcacaaatcatgctgccaatatggtcatgtaagtcatatgaccaattcccaaaagtatcagaaggcaacaggctactaaaaagaaataaatttccatttcaaaaaaattctgttgagccacagctcattattcagtctaaattatacttactatcgttgattacaaagtgtcctgcagcaataaggcaatgtaggaaaaaaagttacattctagaaattctcttccatcaaagttaggcataaagcagagttaatattctgcactgacataaactgtaaaaataatctttgaatttattaattttttagagacagggtctcactccgtctcccaggctggagtgaagtggcacaatcatagctctatgcaaccctgaacttctgggctcaaaagatcctcctgtctcagcctcctgagtagctaagactacaggtatatgtgctaccacacttggctaatttattaattattttttgtagagatgggtatcttgctatgttgcccaggctggtctcgaactcctggcctcaagcaatcctccctcctccacctcccatagagctgagattataggagtgagccactgtgcccagcctataatctttgaatttaggaagaagttataaaggactaaaagacttaatcaggatgaccatatatactaatattagttctacttccattaaattcactagtcatcaacagtaaatgacttttgcatttttgtcaatttcccatcactactctgtattcaaagcataaggtttcatttttaccaatcattatctttcacaataaatatgattataatgtcaattttttaaatgtgctaatatccttcagtgccattgctagtagtatgtatttggtcttagaacaatcagccctgttctttcttattttatgtattttattgtgtgagatgatgtgagaagtttttggttttgttttcttgtttatttgtttgcttgttttttttttttttctcctttatagctatgttagaccagaaaggggtaactgggggttaattgctgttttgctttttgattttgcacctgttaaatgagcaaacgggcaggaatgggaagtggaagggaggagccctgtcaggagcttcactctccatctctttgcccaaatgcaagagtaccattaggatctctgattataaacagcacttaacatgtggacaagatctggtgaaaacatttcctagagaaggttattctgggttaaaataataagcagtttgcctttgtgaggtgctttggaatctaaaagtaattttgcaaattgtgtcattaccctcagctggtaaatggtcaatgctagggcctccatccaggccttctgactctattattttgctcagacccagcattgctttattacaggcaaaactccttatcgaaaagaaacgtgtagttatcggagttgactagtgccagttctggataaaatgtgtagaggatgccatcacttccagttgcagtgccttcactacccacccaccactgcccctcacccgcttctccatcactagacatctttttgcacagtggtagaaggcaggattccaggaagtagagcagaaggcatcttggagtagaagaagtcaagagccttgggttctgtatgagtctgctgctgacaagctgtgccaacttttgcttatgaacatcttttctagttattgaattattcatcttgaaaatcatatttaatgtatacttggcattctatgacatgactatatcatcatttatttatttattttttttaagagacagagtcttgctctgtcacccaagctggagtgcagtggcacgatcacggctcactgaaacttccacctcccgggttctagcaattctcctgcctcagcctcccgagtagctgggattacaggcgcacgctgccatgcctagctaattttttttttttaggtagagacagggtttcaccgtgtttcccaggctggtcttgaactcctgagctcaggcaatccaaccgcctcggcctcccaaagtgctagaattacaggcatgagccaccgcgcccagccatcatttatttttaccaatcctctgctactggatgtttaagttgctttaagtgtgtttcaccattataaacaatgtcataaagatcattcaggttccctgatctttgatgcttatgcctgttcttgcctgacggtgtgtcctttctttcacttacagttaatatgcaaggtgtctaccttaagagccttatgtggacgacatacagaaaagctaatggcatttaaagcaatatacccagacattgtgcgacttcattttcctccattatacaaggagttgttcacttcagaatttgagccagcaatgcaaattgatgggtaaatgttatcacctaagcacttctagaatgtctgaagtacaaacatgaaaaacaaacaaaaaaattaaccgagacactttatatggccctgcacagacctggagcgccacacactgcacatcttttggtgatcggggtcaggcaaaggaggggaaacaatgaaaacaaataaaagttgaacttgtttttctcatgcatatgatttccattatgcctacagatatggaccctttttctgtcttgacttcttgatcattgacctctgtttacaacaggaggagggtactaaagtcggaggatttccttttcttgtagctcactgcccacagactttctacagagtcaccaatctgtcagtaacaacagagagtccagcaataatcggtgactggtgtgcatagcggaggttgcggcattactttgcacaactagctctttgtttcatgaaggaagtttttattttttcaccgattattgccagtccgcaggatggcatgaaaagggtccatagcagtagcaacaatagcattataatatattacagggtaaatgggcatgaagactatatatagctaaaagagatattgtttatatattgttttaagtaatataaaatgtagttactggtgtagcttttcctgttgaattgataaggcactttcattttgcacctttttctttaaattaaatgctagcgtgttcactgtcgtgtcgcatgtgcaccagaaacacaagtttaactgagaaggcttggaaggtacgttgggaggtatttatgctgctgtttacaaaattatttttaagagactggctggtcatatctagaaatcaccacgttggattttttttttaacatgtgaatttggaattagaaacggaactctccctaaattatactttgctttttggtaagtttaatgatagatgtgtttatgcttcatacaaagttgaatgattgattggcgtggtggacatataccatcatgctcattttttttttttaaagctttttaaaatgccacctcatggaggcgagggggaggagaagctcattttacacaattcagtagttaaatatggactcggtctcaacttggaattcttatgctttgagaacaaatcaacaaccagaatatttattggaatctagcttttattataagaaggacccaaagattatatcctgagcaaatgcacactccccatgtgaggacatgaagtatttactttgtgaatgtttatgttcttggtataatctaggaaccctatgagtttatctcagagtgaactaattctagatttgttgtcaatagatgctataattcaagaatgttgctctccatatttgaaaaacgatggataggagggtgagggaagcatacaatgttgaaccagtttctcttatttaaatattaaatactttaagcctttaaagtgaagttgatgctagctgcaaacatttactcttgtatttatcttcactaggaaactgtggactgtaatttattttattaaatatttagaagattatttggcttgtgtgttcaggtgagaaatactgagttgtttttgtttaatttcatggtttttttttttttaatgatccctagtgggggaaggggaaaggaatagtctgataaacagatgtgcatattttaaaaacaagtgaccttttgggaatgtaggcatttagacgatgattttagtcgcactaggggtgggattcaaactactggtcaaagaccattttgtacagaaaagggaacatctccgatgggtgttaaggtaggagtttccatgcagccctttatgtctgagaaatagtctcctctgccattggggtccctgcggaatcttctacaggaattgcagctcttcacgtcatgctaggttaccagcatgggcttcccagagcacttcactctgtttctaactccactgacttttctgacttgtttcttgagggacttggaaaaggggaaggtattattcacacagatgtgtgtatgaagcctaaataacatccaactttttttccaaaaacatagtaagagtttaaccataaatagaagagtaatattcctttaaatttcttacaggcatgtaaaattttatgtgtttatagagagatgctaactgtcagcatatagtatttatattggggcaagaagggttaaatcaaatctttaatttaagtaagcatagttcctttaaagatcagtagtatttatactctgaaaagagtaccaagcttagttcagttatttattcatccattttttttctattgtttctcctctggggggaaatggtgttttgtttttgtttgagttttgtgttttagttttttggttttggttttgttttgtttttttgtcattcagattcactaaatttggggatggttttattaaagtatattaacttctttttaaccaaagctttctgaatatgaccagcctcaggtgctagcgcattaaagagcaactaaacctaattccagtgtcgatttgtgaaataataaaagctaattgaatttctctaagggtgagagagaacataatgatgaacttaaaaagaaattccttttcccagaagggattctgcatgtacctacaaacaatcatgctctaaccacagtaatagtcatgccatggtgacattgcttttacggtaaaccaagataggtaatatgatgcttcttcccaggtgtttctgaaagaaaagcagcggtggagcttaagagccaagtccactgattgacataataggatggaattgtagacagagacatgctccatgaaacaaggaaacaactgactactatttggatctaagttgggatctgatgttaaacaataaattcagtttaaaaaaaatatggagctcagaaaaggatgtgaaaaactttgcattttcctttcttcattattacaaaaacacctatgtgatgacataaaatacttgggtgatatcagaacaattatccttaatagtttttataattaaagtttcctaaacttcagtctccaatagtcttttaaggattggaaccacatcactgtcagccccgctgctacaatgcctttgtacaatttttttacataaggcaaataaggcttttgtacaaagcctgaataccttctgttccaatggtgtccaaatggttattatattgtgaaaaacctggccttggtcacaatgcaaacaaaagtacagatgaaagtgctttttggacagtttgcaaattgtgttaaagctacggattttttttaaagtgttcagcatcttaacgtgtattaaagctatggatttttttttaaagtcttcagcatcctaattcaccctttctaacttaagaaaaacatgacttaagacactgcttctaagtttggttgttctttatagtgtggatacccagttatctgtgagcgtatgggggtgggctgagggtcaggtgaggaaggagtgtgtgtgtgtgtgtgtgtgtgtgtgtgtgtgtgtgtgatttgcatgtgtatgatgtgtgtgcgtcggaccgcttctaggctactaagtgtcaatggaaaagaaaatgtattcaaaatacttaaatcaaaactagaagatggggaaaaaaagatttattctatacaaagccttgtctggaccactttagagagacttctatttttttaacccttctataaatatttgatggcacttgaaatattcctgcaataaaatgtgatttgtgtaaagaaaaaaagattttgtaatgtgaaacaaagaaagaaagtaatgtaattttctaaaaaaaaaaatacaaacaaacaaactttgtattattttcttgatggaatttgtctatctgtctttggaaaactttttatttcattgaatgtgccatagtagaaatgtgtgtttttagttttagactaaggaatagctagttgttgtgttccgacattccaaaatgcaaaacaacctagtagtatctttcatgaaaaggtttaagtagtatgtaagcttctctcattgttgcttttttgcacatgttcttcattcctctctagtgcaatatgtacatagagcacttgcgggtgtaccttgatccctcagggaaaaatacatatttgtacagttttttggggtttttttgttttttggttttttttgttttgccttttgtttttggctaaggaatgtcgatcgaatcacttgttattgttgaggggcagccagataataatcctaaagccactgtttccaacattgattgtttaaatcatatgtccttccaatgctattattttaagataataataaaaagttattttctgacagttctttgtgctgactggtgaaaaacaagggtaaataagcaccttataattgacttactgtgaatgacaatccatcttggtatcaacgatagaagccctatcattttggagttggggttaagagtcagaaacaatgtgctcagggatctcctaaaactcttaaaacagggtggccagtactactgggacaaattgtgttttttattattaataataatgataataatactatccctccaaggcacaagtgaactatatagaactgcgtgtgtgtaaactctttactctcgtctcattttgttgagtttagaacttgatgtgctcgtcagtcttgtgtttcaaaacactgaataacttccaaagcaaagttatgccagtgtgttcaaaagataaattaataatgtaccagcaaagagcatcattcaaagtatagtccttgcatattccagttaccatttctctaataattaaaatattcatgataaatatatatatagcatcatatgttaaaaactatttcaaattctacatattaaggatgaaaattttaaaatccagtaataagaggagagacctgcctatcagtacagtgatataggtaaaagatgaaatatgtttttaaaataccagcaattaactattgttttcatgggttctcctctagaagcaaaccaaaaattccttcatggaaaacaattcttacttctacatgtgtagtttatatctgatgcattacaagagctaatgtttaaagacaaaacaaaacctgcctgtatgacagcagcaactcgagccaacatttagtgttacatgttatatttttgaaataccgttttgttatcatattccacatattactttccataaagtcagagaagttcaatgtaattgttggctctgattcttccaccttgggatacacattcacaagaagatttatatattttcttactatgatagaggaacataatctgggaaaacttcccatgtctgtaagatgaaaaggatacctttaccatgttgtttttgataataaagaatatggaaaatggtagaaatctctcctctctatgtgtatttgtatatgtgtgtatacacacacacgttgacatttttacataacatgtgattgccacttcttataaagttatgatatagaaccccatgaaaacaactttatattatagatcaaataatgtgcccagaaacgcaattgcaacagtaaatcttgatctattggtaagagtctatgatacaggtcttcattctatccctaaacataatgttagtaaagaggttccatcagattgtattatagagaccttcctattgctatttatttttaagagatgagaagactgactagcaatgtctccacagtgcaattggtttcacttctgggtctgtctgtctgtttgtgtaggtgagatcagtgttgtcaggctctcagaataatttttaaaagaatccagaagcctgacttcacaccaagtagccatcctagatgggcgggggggatctccatgttcaaccaaaccctcagaacttagagcaataaatacattcagtcatttatttataaatgaatgacagaatattcaatccaaatagaaacaaccttttgtcagtgatgcaacataacatggagtcttatattgagaaagtgaatatgaatattttaaatagatgcctaggaaatctgtgtttgctgtttacatttaatgtactttgccacattagcagtaccacacttcttttactttcatccttctaagaactaatgaaagatagcttgctattagctttgacatgttgcacatgccattatgttgttctctaagaacaactaaattctctccagtgttcatgtgtgattcctttttcatcattattactttaatgtggatgaatactatttctaggaacttgattatcactgaacagattgcatatgtaaatgcagataattcttgagcaatatagtgaaaatgatttcacaaaaaaaatccatatgtactgtatacatcttcctgaatccaaaattctcctgttatccacacagtttgaaatctcatattaaacagtggtaaatttttaaacattaggacattagctggctgcttctataaatgtacctgtattgtctgcctgctccttttgtggagatgtgtttttgtattggatgtttgggccaatgggaggcttcaagctacaacatattttcccactttaaataatatttaacatatgacaaaccccagacaaggcttttaatatgtataaagaactgcagtgttaggtggtttatttgcaaactgttttcagtgttgtccatttttatggcacctttaacaatattcttgtttccaaagtacaaaaaaaataggttaaataatctagccataactgaatgtcaagcaataaaacaaatgacttttgtgcatagacttaaaaaatacaaattttagacatctgcatgtaaatgcaatctcttgtttactgctttcttcaacttgagcaatcgattccttatttactattaacttaagaacttgtaacggcctgtaaacattttctctcttactcttctttcaaatttacctgtccctgcttttgagtcataatatttaatgttgttctgcacatctctatacagttaactttttggctttcattctgtatagataagaaaatgttatattataaacagcctactcagtgcaaatatttatctgtttatcaaatccacaatatgctgtataataccggttttactatataatctattttagacatagctgtttagaactagagtgtgctatttttgtgtttttctgatgtgtggtgctagacaagttacttttgtgaacaacaaaaattatcccttttattcctagacaataccacctttgggtcttgttaatttcactgagtataactatatatttgtatatatatacatatatatatatatctacctatgcccaactggcagctgtatcagagtgctggatttgggacatgcttttctctttaaatacataatatcattatataaattattctagagtgtatttaattaggataaaattacttccttagtatggatatttgacatctatagggtgaatttgtttataaatatggctatatggaaacttattagcatttactttatgtttgctacttggctttacagcatatctcctaagctgaaaaataatttgccaggccttcaagatcctaaagaaacttgtttaatggagtaatatacttttttttcttattaaggaattgtattactggcacctaacacagttgtattcttagctcctattatagataatgggcatttacataaaatatcctagatggcttgatggcagaataaacctttcccctcctacctgagtcatgagaaggatggagacgtcctctgccataacatgggccataaagcaaattcgacatgggatgttctgtttcagtatgacctcaaccagttccatgaactgagtgaaggaccttcattttcaaagttatttaataagtagcttaattaagcctttctacccattctcccaagatctactggcattattgaaaagcaaagtttatcaaatatctaactaaggatgtagttaaccttattaaatattgattagaattgttctgtaatattactgaatttgtaagatctttagcaaagatttttgagcaatttataaatgtagagcaaatgtttctgtttactgcactttttgtaactgaaggtgataaattctcaagccatgattattggcttccatgcactgcaatatttatccacaattctagacattttccatttttgtggaagagttgctgttaccttaattataaatgcaattgtgtggttaatgagagctaatgctagtagttaaccttttaaagtggattggctacagttgagggagaaatctcttttaatataaatcacatcattccttaactgcctctcttggaaagagattgaaaccttttttttaaagcacgatttagcatcctaagcttcctgagggtagagattgtatctttttgcgtctgcacaatggctagcacatgtcagcatttgacaattgttaaatgataacaagtgtgccccaattaaaacgtttttcctgggttgttttgttaaatttacaaagtaagccaagccttacggttaacattctcctctacaaccaagtattaaagccacatttaaaaagaccacatgaaatgctgattctaattgtgtgtaggtcttgaggattaagcacacaaatttcacaaacttctgtttgagtaaacaaactcagccttctgtaaatatacatgcaagtttggaaacagtaatactgtacctataaatatatgctgtctgttttgtgtacagtatgtaaaaactccttttctgccacactaaaaatgcaagccatttatgggaatcctaaaactagtattgaactaaaactttgctaatgatctttattagaggatcgtccaacttttcacttaccttgggttttcttttcaattcactcttacactagtctgcttatttccagctgtttattttattgagtcctgaatttaaaaaaaaaatattttgattcattttgtaaatacaagctgtacaaaaaagagagatttaatgttgtcttttaaatactccaattttcattctaatatgaatgttgttatattgtacttagaaactgtacctttaatattacattacctttattaaaagtgcattgaacacatcaattttagatgtgctttatgtactgttatcctataataaaacttcagcttctaatggaa

SEQ ID NO: 196 - DNA, 221162 bp, Homo sapiens
attctaaccatgctggcagctgattagatggtgcccactcagattaaaggtgggtctgcctctcccaatccactgactcaaatgttagtctctggtaacaccctcacagacacacccaggaacaatactttgcttccttcagtctaattaagctgacactcaatattaaccatcacagtaagcatatcagagactatagggtctgctgtttgggacagggtgttctgaaaggacctctggtaaggtgacttttgagcatagacctgaagaaaatggaggaatgagccctgtacattgtcagggaagaactgctctggcagaggaaatacagatggaaagggcctgcactggaaaagtgatcggcatgttagaggcacagtgaggaggccaacacaaccggtgaggagtgaatcaggagaataataggggatgaagtcacagtattgggacccaggtcatagagagccctggaaggcattttaaggacttggactttgaggaaaatgagaaaccattggccagtttggggtacatggatgatatttaaccagaagattctttttcctctctatcaagtcatcactttccacattttatggaaagaagttttatcttttcttgttaagctattggtgaatttttaactttggggttttgtttcggataggtattgggagaaggagaggctgtcaacccatgccactatgctatctctaattctgccatccagaccgagtaagttttatttccactgtattctgccgtccatggcttgcaggaaggggttcacccctactcaccctacaggccacttccatgaagagctgtgcccagaggctccctgggcccagcacaacaagcacattcacgtatccccagcctcaaatgagcctcatttacagtccagcagtgtgtgcctgcacggtagttctttatgtttccttttcaataaatatatgactcataccagtattgtcctttgtttagctttcatctttctcagagtttgaagtgtttgtaagaaatagttgtagatttatttttaaagccttgctaccttaaatcaagaatttttttttttttttttttttgagacggagtcttgctctgtcgcccaggctggagggcagtggtgccatctcggctcactgcaagcaccgcctcctgggttcatgccattctcctgcctcagcctctgaggtagctgggaccacaggtgcctgccaccacgcccagctaattttttttttttttatatttttagtagagacggggtttcaccatgttagccaggctggtctcaatctgctgaccttgtgatccacccacctcagcctcccaaagggctgggattacaggcgtgagccaccgcgcctggccaaatcaggaaattttaaaagcataacatgccactgtatttctttttcttatgaaaagcaataatgctaaatttacaggcataatgttgtattggcattaaagatggctatcaatccattaaaataatcaatatgttatttcttgacctcctggcctcatgatccacctgcctcggcctcccaaagtgctgggattacaggcgtgagccaccgtgcccagccaaaataatcaatatgttatttctgatgctgaatgtatacacaaaagttttcaactatctgaaaaagaggatcttctgataaatattcatcatatcctaatttttaaaattagagtacttcaaatttagatgttatgttaaaaaaaaaaaactccaaattctcacacgtgaaacctgatcttggttctgatgtttactttttttgaagtaagtagaaataattgagtacagaagaaacaattagctagatttgttaaaatctggttaaatattgttttaattatcacagaagatgtaaagaacatgtaattttatggattatttatagaatagtgggcaaaaccaattaggtattaagaagtgaaccttgaatttatgcatttttgtaacagaacttctagctgtactaaatacaaactgaatttttggagttaaaaaactctttcattacgcttaagatatattatttatcatattaataagcttctcacatcatacattgtgtattgttattgtggttatttttgtcaacaatttttatcaaatgagttctaatttttggtggagaaattttggcaactacacaaagaatgtaccaaatatcacttctgcaaactacacatatgaacttttcaaaatccataaattactcttctctggtttggctgaagttagagaagcattgttaaataatatttactgaacactttttctaaaaaaaattgtgtgttttcataatgtgttttgatttaaaagaaagttgttattattagtgaaaacattttttgtaatgagccaataaagtcctcaaaattaaaatgaatcatactatggaagacctacatttgatacacttttttttctctgagcaggcaaacgtacttaagacctttgtgtaagatcagaaaatcataagacagcattaaaaagtactatacaggaggagatggaacaagatggccaaatagaagcctccagcaatcatctccccgaaaggaattgaacaactatcaaaacaaaattgaacaactatctaaacaaaaaagtaccttcataaaaaacaaaaatcaggtgagtgatcacagtacctgcttttaacatcattttttaaaatactttaagttctagggtacatgtgcacaacgtgcaggtttgttacttatgcatacatgtgccatgttggtgtgctgcacccattaactcgacttttacattaggtatatctcctaatgctattccctcccccctccccccaccccacaacaggccctggtgtgtgatgttccccaccctgcatccaagtgttctcattattcaattcccacctatgagtgagaacatgcggtgtttggttttttgtccttgcgatagtttgctgagaatgatggtttccagcttcatccatgtccctacaaaggacatgaaatcatccttttttatggctgcatagtattccatggcatatatgtgccacattttcttaatccagtctatcattgttggacatttgggttggttccaagtctttgctattgtgaatagtgccgcaataaacatacgtgtgcatgtgtcttcatagtagcatgatttataatcctttgggtatatacccagtaatgggacggctgggtcaaatggtatttctagttctagatccttgaggaatagccacactgtcttcccacaatggttgaactagtttacagtcccaccaacagtgtaaaagtgttcctatttctccacatcatattaaggaaagaggcactgaagaggataggaaaggcagacttgaattgcctacaccactcttcccccatccccagacagcagcccctcatgatgcagagagagaatctgtatgcttgagggtgggacagtgcagtgactgtggaattttgcattggaattcagtgctgctctgtcacagcagaaagcaacaaaggccagaactcagccagtacccatagagggagcatttcaaccaaccctagctagagggaaatagcccatcccagtgacagaacttgagttttggcaagtcttgccaacacaggctaaagtgctctggggttctaaataaacttgaaatgaatggcagtccaggccacaaggactgcaatttctgggcaactcctggtgctgtgctgggcttgaaaccaatgggcttggggtgcacacaacttagtgagacatcagctggggtggcctaaggagttcttgtgtcacccttcccaaactctaggcagtgaagcttgcaacttcaggagagaaccattccttccacttgagaggagaagggagagtaaagagtactttgtcttacaacttggataccaccttagccacagcaggatagagcacagagcagagtcccaggctcccattccaggctctagctcccagatgacatttctatacataccctgggtcagaggagaacccatcaccttgaagggaaggacctagttctggcaagatttatcacctgctgactaaggaacccttggtccctgaacaatcagcagtggtagccaggcagtacttaccatgggtttggggtgagattcagagccacgacccagtacattcccagcttttgtgactatgaggagaaactcttctacttgaagaaaagagagggcagaataaacaagactttgtcttgtagtttgggcaccagctcagccacagtggcgtagagcagcaagcatatccttgtggtccctgattccaggccttggctcttaggtgacatatctgaacctgccattggccagaggggagctgactgccctgaagcaagagtcccaggcctggcagcatttaccataactgactgaagagtgcttggatcttgagtgaacatgagcagtagcaaggcagttctcactgtggacctagggcagtggtagccatgaggagagactcctctgcttgtggaaagagaagagaagagtgggaagaattttgtcttgtggcttgggtgccagctcagccacagtagaatagagcaccaggtatatttctaaggtttccaactccaggccctggctgctagacagaatctctggacttgcacagggccagggggaactcaccaccctgagaaggacacagtctgtctggctttgccacttactgattttagagccctagagccttgagcaaacataggtggtagccaggcagtttcacagctgactctgagtgaaacccaatgctgtgccggcttcaggtctgaagcactgtcctagtggtggtgggtacagggttgtttgtgtcacccctcctctagttccaagaaactcagcacacacagagagagagagagagggagagagagagagagggagagagagagactccatttgtttgggagaaagtaagggaggagaacaagagtctctgtcaggtaatccagagaattattttggattttattctagactatcaaggcaatacctctatgagtctgcaagagccacagcattactgggcttggggtggctcctaatgcagatatggctacagtaaccaaaaacttagattacaacactgaagtttcttcaaatgcctgaaaagcctttccaagaaggacaggtacaaacaagccaagactgcaaaaactgcaataaataccttatcctaactcttcaatgcccagacactgacaaacttcaaggaaaatgacctcaccaaatgaactaaataaggcacaggggtcaatcctggggacacagagatacgtgacctttcagacagagaattcaaaatagctgttttgaagaaatgcaacaaaattcaagttaaaacagagaaagaattcagaatcctatcagataaatctaataaacagattgaaataatttaaaagaatcaagcagaagttctggagttgaaaaatacaagtgacatactgaagaatacatcgaagtctcttaacaaaattgattaagcagaagaaaaaattagtgaacctgaagacaagctatttaaaaatacacaatcaaaggagacaaaagaaacaagaattttaaaaaagaagcatgcacaacacctagaaaatagcctcaaatggcaaacctaagagttattggccttaaagaggaggtggagagagaaagataggggtaaaatgtttattcaaagggataatagcaaagaacttctcaaacctatataaacgtatcaatattcaagtacaagtttaacccaaataagattatctcaagacatttaacagtcaaactcccaaaggtcaaggataaagaagggatcctaaaagcagcaagacaaaagaaataaataacaaacaatggagttccaacacatctagcagcatacttttcagtggaaaccctacaggcaagcaggagagttgcaggacatatttaaagtgttgaaggataaagatgataacctttgaataatatacctggtgaaaatatccttcagacatggaggagagataaagacacccagacaaacaaaagcttaggaatttcatcaacaccagacctatcctacaagaaatagtaaagggaattctttaatctgaaagaaaaggacataaatgagtaataaatactctgaaagcaccaaactcactggtaatagtaagcacacagaaaaacacagaatattataatactgtaatcacggtgtgtgaactactcatatcgagtagaaggattaaaagataaacctataaaaaataactataaccatgtttcaagatatagacggtattataagatataaatagaaaaaacaaaaagtttaaaagcagggagatgaagttaaaatatggagtatttattagttttctctttgcttgttgtttgattatgcaatcagtgttaagttgtcattagtctaaaataatgaattacaagatggtatttgcaagcctcatagtaatctcaaataaaaaccatgcaaaagatacacaaaaaataaaaagcaagaaattaaaatgtaccaccagagaaaatctccatcactaaaaggaagacaggaaggaataaaagaaggaagagaagactatgaaacaaccagaaaacaacaaaatcaaaggagtaagtccttaccaataatcacattgaatgtgaatggactaaactctccaatcaaaagatacagaatggctgaatagagtttttaaaaagactcaatgatactataagaaacacacttcacctataaagacaactatagactgaaaatgaagggatggaaaagatattccatgccaatagaaacaaaaaaagaacaacatttactatatttgtatcagacaaaataggttttcctgactgtattagtctgttctcatgctgctaataaagacatacctgaaactgggtaatttataaagaaaagaggtttaattgactcaaagttccaaatggctggcctcacaattatggctgaaggtgagtgaggaacaaagtcatgtcttacatggcggcaggcaagagggcatgttcaggagaactcccctttgtaaaaccatcagatctcatgaaacttattcactatcacaagaatagcacaagaaagacccacccctatgattcaattgcctcccaccaggaccctcccatgacacaagggaatgatggaagctacaattcaagatgagctttgggtgaggacacagccaaacaatatcactgacaaaaaccataaaaagagtaaaagaaggtcattatataatgataaaggggtcaattcatcaagaagatagagcaattatatatgatacagcacttgtaaatatatatgcacctaaaaatatatgcatccagatataaaaagcaaatactatcagagataaagagagagagagaaaatgcaatataataatagctggtgatttaacaccccactttcagcattgacagatcatccagacagaaaattaacagagaaactatggacttaatttgcactatagaacaaatggacctagtggatatctacagaacacttcatccaatggctgcagaatacacattctcctcagcacatagatcattatcagggatagaccacatgttaggtcacaaaacaagtcttaaaacattaaaaaattacaataatatcaagcatcttctctgagcacaatggaataaaactagaaatcaataacaagaggaattttggaaatgatacagatatgtggaaattaaacaatatgctcctgaatgaccagtgcattaattaataaattaaaaatgaaatttaaaatttcttgaaacaaatggcaatggaaccacaatataacaaaaccttgggatacagcaaaagttgtgctaagaggaaactttatagctatacatgtctacatcaaaaaagtagaaaaaacttcaaataaacagcctaacaatgcatcttaaagaactagaaaagcaagaccaaatcaaacccaagattagtagaagaaaagaaataataaagatcagagcagagataaatgaaaaaaagtacaaaacaccaatgaaatgaaaagttggttgttagaaaagataaaattgacaaatctttagccagactaactaagaaaaatagagagaagacccaaataaataaaatgagaagaaaaaagaagacattacaactgatgtcacagaaattcaaaggatcattagaggctactatgagcaattatatgccaataaattgaaaacctagaagaaaatgataaattcctagacacatacatcttaccaagattgatctatgaagaaattcaaaacctgaattgactaatacaagtaacaagattgaagccacaataatatgcctcccagcaaagaaaagcctgggacctgatggctttactgctgaattttaccaaacatttaaagaagaaataataccaaccctattgaaactattccaataaatagaggaggaggagatacttccaaactctttctacaaggccagtattagtctattttcatactgctataagaaatactgaagattgggtaatttataaagaaaaagaggtttaaagaactcacagttccacatgactggggaggcctcacaatcatggcagaaggcaaaggaggagcaaagtcatgtcttacatggcagcaggcaagagagtgtgtgcagggaacctgccctttataaaaccatcaggtctcatgagatttattcactatgatgagaatagcacagtaaaaacctgcccccatgattcaattacctcccactcagtccttcccacaacaagttgggataatgggagctacaattcaagatgagatttgggtggggacacagccaaactatatcaattgcactcataccaaaactaggtaaagacataccaagacaaacaacaacaaaaaaactacatgccaatatccttgatgaacattgatgtgaaaatcctcagtaaaatactagcataccaaattcaataacacatttaaaaaatcattttttatgaccaagtgggatttatccctgggatgcaagtatggttcaacatacacaaatccatcaatgtgatacatcatctcaacagaatgaaggacaaaaaatcatatgatcattttaactgatgcacaaaaagcatttgataaaattcaacatcccttcatgatttaaaaaaactctcaaaaaagtggttatagaaggaacatatgtcaacccaacaaaagccatatgcacaatatccgcagctagtcttatactgaatggggaaatactgaaagcctttcctctaagatctgcaacacaaagatgcccactttcaccactgttattcagcatagtactggaagtcctagctagaacaattagagaagacaaagaaataaagagtgtttacattgaaaaggaagaagtcaaattatccttatttgcagatgatatgatcttatatttggaaaaagaaatgaaagactccacaagaaaactattggaactgataaacaaattcattaaagttgcaagatacaaaaacaacatacaaaaatcagtaacatttctagatgctaacactgaccaatctgaaaaagaaatcaagaaagcaatcccacttacagtaaccacaaataaaattaaatacctaggaattaaccaaagaactgaaagatttctatattgaaaactataaaacattgatgcaagaaattgaagaggacacaaaaaatgtgaagatgtttcatgttcatggattggaagaatcagtattgccaaaatgtccacactacccaaaacgatctaaagattcagtgcaatctctatcaaaataccaatggcattcttcacagagatagaataaacaatcccaaaatttatataaaaccacaaaagacccagaatagccatagctatcctaagcaaaaagaacaaaattggaggaatcatattacctgatttcaaattatactacagagctacagtaaccaaaacagcatgatactggcataaaaacagacacatagatcaatggaaaagaatagagaacttacagataaatacatgtatgttcagtgaactcattttcaacaaaggtgccaagaacatgaattggagaaaagacagtctgttcaatgtatgtgctgggaaacctggatatccatatgcagaagaatgatactgaaccctaaatctaagatttcaaaatgtgaaattactagaagaaaacattgagaaaactctccagaacattggtctgggtaatgatttcttaagtaatattccacaagcacaggcaatcaaagcaaaaatggacaaatggtatcacatcaaggtaaaaagcttctgcacagcaaaggaaacaatcaacaaagtgaagagagaatccacagaatgggagaaaatatttgcaaactatccctctgacaagggattaataaacagaacagataaggagctcaaacaactctatgggaaaaatagaataatttagttaaaaagtagtcaaaatatctcggtagacatttctcaaaagaagacatacaaatggcaaacaggtatatgaaaatgtgctcaacaccactgattatcagagagatgaaaatcaaaactactgtgagatatcatctcacctcaattataatggttttcattcaaagacaggcaataatggatgctggtgaggatatgcagaaaggggaatgcttgcaccctgttggtgggaatgtaaattagtaaaagcactatggagaacaatttagaggtgcctcagaaactaaaaatagaactgccatatgatccagctgatatggtttggctgtgttcccatccaaatctcatcttgaattgtagctcccataattcccttgtgttgtggaagggaccagtgggagataattgaatcatgggggtggtttcccctacactgttcttgtggcagtaaataagtctcacaagatctgatggttttataaggagaaaccctttttcttggctctcattcgcttctcttgtctgctgccatgtgagactgctttttgccttctgccatgattgtgaggcctccccagccacgtgaaaccgtgagttcattaaacctctttttcttttgcaagttgcccagtctcgagtatgtctatattagcagtgtgaaaacggactaatagacaagtaatcccatttctaggtatatacccaaaagaaagcaagttagtatatagaagagatatctacaccctcatgttaattgcagcactattcacaatggccaagatttggaagcaacctaagtgtccatcaacagatgaatggataaagaaaaggttgtacttatacatagtggagtactattcagccatcaaaaagaatgagctcctgtcatttgcaacaatatggatggatctggaagacattatgttaagtgaaataagccaggcacggaaagacagccttcacatgttctcccttatttgtggtagctaaaaattaaaaccattgaactcatggagatggagagtagaatgacggttacttgagtctgggaagggtagtgatagggctggagggaagtggggatggttaatgaccataaaaatatagtagataaaatgaataagagctagtatctgatggcacaatggggtgactaccatcagcaataatttgttgtacatttcaaaataaccaaagagtataattgaattgtttataatacaaagaatgataaatgtttgaagtgatgattactgcatttaccctgatgtgattattacacaatgtatgcctgtatcaaaatatctcatgtaccccgtaaatatatgcaccgactttatacctacaatatttttctaatgtaccctattctaaaaaaaatactatgcaaagcaaaaatgtaaaacaaaaatgaaggacagccagtatttctacctgtatcctgtctctattttaaataaaaccacaagaaaaaagatataaccacaggaaatcaatcaatattcacataacttattattagttgaagtctctaccaggaagtattgcaaacatttccatgataaattttgtcatgtttctcatggctcataaatttccctttctatttaaaaattccaccgtttcatatacatttaagtataaagtaagccaattatagtgaagttataaatctattgtactagctatagatacagaaatatgcactaggttcaccaagtcatgaacgggaaatgtctaataaaataattcaaaatagtgacatatctcctgctagtttcttctaactttcagctcagtcttgtctgaaacagtattcacatataaataggctaatggatgcttcattacactattccctaaagtgcctaagtctcaaatctgattcctagttggaaaacaaagcaaatcctcaagagaggcaaggcctactgactcaatatttattcatgattcctacttttatctgatttccagttattgaatacaaatgtactctcagcttctgtatttcttatatatattattctcctttttatattttaggataatgcttatattgtttttattgtttttgtttaataataaaattttaatgtattcagtatatctttagttacaactttaacaccattccatagacctttataggtagtgattttattaatattcttttctgggtaattgctaatttttatttcctgtttgtccctactgttactgagaataatcattttcagtgtttgagtgattcatcttttctaatatttctttataatgactttgtatgttttctgcattgttgtcagagattgcagcccttacagtgtcttataagtttgacagatgcaatatttgttctctgtccatagggcacaaagtctgatttagttttttaaactaacataatcatcttattcatatcccatatattattacataatatcacttaaagtctcaatttcagttgagtcctaaatacctttcttaaggctaagagcaatggcttaggtgccaagcatcatccttaaatggcaattcgaggggctggatggcctagatgataaatatgaggagaatataaagccagttcttccaacatcagcaggtcactctggattggatttgctgcaaattaatgaagattaatcttcagggcctcttctcttgcacagggccctttctagacaataaataatgttaattaaaagagtatttaatattactgaaccagaaaacttgaaacatcctgagattttataactcaaatatgaaaaaaacttaatagtaatttttgcatgttacaataatttgtaagaataagaatcccaaaaatttatatggcagttccaatagagatgtataaaggtagaaacaacttctaaactaataaaaaatgtaataaaccatgccagagcaaaaattgaaataccttcctattacgtgtattgaaaaatcacatttcttgcacatgtacctctgaacctaaaacaaaagttgaagaaaatcatatttctaaatcactggaatatgaagaggagatcaatgaatagacggccaaaagttatatggctttagaggtatgtcaggcagttaataaaaatatatattttttattttgtgagatttatagtatttgtgagattttcaaaatttgtaactagttctgatttctttttatcttttatttttttgagatgagtcttgctctgtcacccaggctggagtgcagtggcttaatctcggctcaccgcaacctccacctcccgatttcaagcaattatctgcctcagcctcccaagtggctgggattacaggtgcccaccaccacacccggctaggctaatttttttgtatttttagtagagatggggtttcaccatcttggccaggatggtcttgaactcctgacctcatgatccacccacctcggcctcccaaagtgctgggattagaggtgtgaaccaccacgcccagcctctttttatcttctaaataagaattcacattcattcttaatttttatttgttactttggattttttttaaggcttctccaaaactgtatcagcctcatgcccctcaaaagataggcaattccctagtggtcacgtactttcaatggcaaaagatgatgtgtggaagagttgaaaaagaagatgcatttgtatcccctcacctcaagccaaatgactacaagtttcatggacacagaagctgaggaaactgttaaatcactgtgtgtccccacctccctttatttactgccaactatgaggaagggtttctccatcacctcagccaggtgagaagggctatgagagaatcatagcaagacatcagcatgtcccctggagaaattggtgcctgacacttccttcaagatttctaaagactggagttgtctctttttagaagtaaagggaaatcagagtgcttgggcacaaactgctcttccacggaatagggcaaggatgcctgagtttctcaagagtcaagttgttcccagaaaggggacatacttgggaaattttaagattccccactcaagggaactacctggagaggcaaaaagaccccacaagagagaagctgtattgggtgaccccacctcctgcctggtttctgaggaaggagagaaagttttcatttaaatgaaatttggagttctgattattgcattggactggatgttttaattattgaattgtgattgctcttgtggctctgtgacctgcctgagatatcattcaacactgaggaaagatctaactgagtttgaagggagtaagagaaaagaataaagttgctttatagtgtgtaccctaatgagccctaattattcaagaacagttacactccatttacctttcaccttcataatttaccagagacttagatatttatgttaaagcctccctattgtttttcttcagagcttcttttctattttaacgaatatttttaaaaattattttaaggctacattacatagtacataaaggcttattatgttttaacctcaacaaacatatagacataaatagtgtctacttctttctttttctttagcattgacctaactaaattcagctttgagagaagaagatgtagtctgagtaatttctgtggtttggaattgttttaattttttgttgtcttaaaaaatgattttagacaaaagtgattcatggcatttgaaagaaatatatattcactgtttaaagaaggcaagtttttctatatctacatctatattatgcatatctacagccagatataaagcaaaattattttttctcaaaaaaatcaatcagaaaaaagaaagtaccttccttatatttgaaacccatagcaagttccaagaggagaaaaggacagagtataaaattcttcattatgctgagcagtggacctgattttctccaggtctttaagcctatttatgtatccaaaaaaggatggagatgacagagttcctcaatgtgatgactctatatgctctccccagagctcttgcaacatgacagaactttgctaagcccatattagactaggaatgtgatcaacaaggcaaagatttcggggagaggtcaaaaattatttcggatatactggagaaccagagtggggagaaaacagaatggcactcccaagctggccaaatttatgcaagctaaaaatgcttattatccttccggccagcagttccatttattaaggtctatctttaaaaaaaacattgtacatctacataaaaaaccatgaacaagaattttcagggagcattattttaagagcaaaaaaaaggcaatcatctaaatgctcaccaacagaaagctaactaaattatgctacacccataccatgaaatactgtaagtaaaatttatatactgacatgtgagatgcataagaccctacaaaaatgtttaaatgaggttgcaaaaatgtataaagtctgatcacatttgtgaaaatatgtttgtgtatggttttgaacaaatgcctaggaaaggttttggagggatgtaaaacaaagctcttcatgctatacttttgggaggcaaatggggctagggagagtgtgctgaagcgatgctgaagataaacttctcaactgattaaactttacaatgagaatatgttcatgtattaattacataaaagattataataggaatatggaaatcatccctttacaacttggaagtttggatttttgtaacccacagagcaagcaaatgaagctgaattcaatatggattataaagctttagaattttgcatttccattttatcatataatactaaaaaaattgactttcattgccactaaaaattttatagtaaaaaagttcttacccattgacaaaggtgctagattataaatgctactaataaataaagaaatcattgggtcgacatccataaatcgtaagcatttattaaatataggatacatttctggtactatattacacacaaatatcacaaagcatcttggaactcaagaaggtagaatgtagttacattgtatctggtctaatcaaagagattctaacaaattaccagatatgtttactttcaatattatcatagttgactgcttgaataaatgacagttaacttctgttgtatttgccagtctgtatatccataataaaatacaaaatgctaataaaaatattacattgaatagataatattgtcactatttcaaaacatgaggagctgacagtaaaagactttgcttacggccactaggcaaataaatgtcagaatcagaatgtaattctgtttctaatggggctacatattttatatctttccattctttcaaaatacctcctccctacccatgtggcaatttagaaaggattgcaagaaaatacaatggagtgctcctctccactttatttttttaagttttagagctgaaatagttaagtttcaagaactgttaaattttctagcccagagcattgcattgctcataaatattagaaatcaattactgtaaaatggcctattacatgtattttaattcatttttaaaaacaattcagatttagtcttttctggccttttcctgtttttaagaagtcttgcagaaaaaaatgtattatttatactttctgaaatttttccagcttaaggtttaacaagtattatttgaaagaggccaatactcctgagtagttcagatatttgagctttaacattaattatgccctttagttggattgcttctattttaggttatagttgaagtcgtagacaatggtattgttgatgggggcatagggttgttggttagaggaataagaaaaggtaaaatgattgaaaaaccggtaatttcagagcatagacactgtgaaagagctgatacagatgtctgtcatcagccataggaggctgggggtcaggaagtatcaggaaacaggaaagatgtaaagaaatgacagtgaaagtgaacttgattataaaaataatattgataacaccattattagaaatgtcactaccaataatgattggcatttatagtgtgctttaccaagtgccaggcactgataagcactttacatatgttatttcacttaatccttacagaaaccttacaatatatttttatgcccattctatagatgaagaaatggtggcttagagatgttgagcaacttgaccagtttacacattagtaagtactctgatccatccagaataatttttaatatttctaggaggatcagatctcatatacaatgtggaaattctccaagttaattccatgaaatgtggatttattttgtgctcagaaatataagtagaaacctatagctagatttccattccatggccgaaattttattttcttccaagtgcccttcaagaggacttagagcacaaaggaaaaaatgatctgtgaaagtcaaggaaaagctgacaattgaaaccatgattcctaatctaatgcctttccattgctttgcatttcatatgaacatctctctgtgtgtctctctcttctctctgtctctctctctctctctctccctttctctctcttctccctacaccccttcctcttatttttccttgctttgaagattaagattctccatctcagtccctctgcttccctcactattttagttttcatgtggtttgggcccactatggctttgatttcagcttggactctacatgacctcattgtgagctcatcactgttacctgacataggtgtgtcaatgtcaaattcccaagatcctgcattccgatgaacctgaattgcatcacttttccacttctggtgcaattggttgttgtcatggcccctataataatggagctgcctcctttgagggcttgtaattgggatgtttttgctaagaaaagagcatgaacggggaagaaataatttgtatttttagaacaatagcattgaagcagtaggtggagaagccaaacttctgaaaggagaggagcctttcagttaggaaataacctgtgagaacagccagaatagcaaaggctcttctcatcttacgctgtctcatctttttttgtcttctgctttttctttgcttcatttaattactaaaacttttatttttaaccttctcattattaaggaatttgtcaagagaaagtagatctttgtttaatatcactagactatgggtaactaaaagggaaggactcttgttatttaactctgcgtccttagcaaccagcaaagggtctgggttcttgcacttgtttaataaatatttgccgaaagactcagacctggagcagaccaccccagggaggcagatgttgtgttagtagaagcagaccatgatcaagggcagaggtgattgggcaatcagggcaggcagtgaaagagaatttcagaagcttacaaatcaactgtaaatatgatgttagtatttctgagcacataatagccagatgaaactgggaatagacagactactgtgcttggggtgaagcgtaagcacttaatagaacaaaattgttcattccagtactaccagcaatagctcaaaactcaaagggctttgtggtgctttaaacctttctttaaaactctgcaactatgactgatagtaacacagtatacccttttcattcaggcaattggctcacaccttcgtcctatcttactcccaccactgagcatctaagaagcctccttgtgagtgggtagctataggcttttgtcctgacactcttgccaagttaccaaacaatagtatactaaagagatagatagcatgggccaaacagagataaatgatgtttttcaccaagtttcctgaacccattaaaaatgtggtgtatgtatcacattatataatatgtacataataatatataataatattccattatataatgaaatattatatatactatatttaatggaatattgttaaatatataatggaatgttattatatatataaaatattccattttattcatataaaatatatgatttcattcttttcatggctgaatataatatgccattatattcagccatgaaaagaatgaaatcatatattttgcagcaacatggatgaaactggaagtcactgtcttaagtgaagcaagcccagcacagaaagttagatattgcatcctctcactcataggtggatgctaagaaatgtgtcacatggatgtagagagtggaattatagacaatggagacttagaagggtgatggggtgggaggagggtggatgatgagaagttagttaatgggtataacgtacattatttgggtgatggataccctaaaaaccctgacttgaccactacatgatctatgcatataaaaaattacacaagtacccaatacttttgtacaaatattttataaaaagctttgcctccaatccatagcaatcccctttgatttgtggaagagtcaaaatgaatggtaaagatagattttcttttcataatcttttacttggtaactaatctcactgaaaatgcatgaaaaggaagtgggctagggaagcaaggggaaccatgactaaatcattctgtttcagtctctgcatattttactttaacataaattaatctaatagtctccttctttcaagaactaccatttctctccatcagtatactgacaaaaaattgtcctccataaaaatatgggaaatgagtataagttttaagaagtctgatgttcacaagtatttaatcataaaatttaatttgcaaaaaaggtgactaactttctgaatgtccctttggagattttgattaatgtcttactatggagggcacagcctttgaaataccttgtgatcttgcattacatggggtcaggtgagacttcaatttatcagagagccaaatttcactctgacaatgaaagtgactccttgggcacctcatacttttcctttaaaaagcctctgctttttctaaattacatatttagctcctgtgttactcttatctcttttaatgcagggcttggctctaatgcaactatcacaggtggaccaggacctgctcttgcctggcaagagcctgtggaacttcaaattcacacttcaggaaaatttcattttccctcatattaattgtgatgtcagactcaaaatatttcctagctccaagtgaaatgttttcttttccccccacattccctctccctagtccagtattatggaactaaaactacaaatgctgctaaatctcttaaaatatgagacattgacatggagtatctgctgacatagttgggtgatgtttaaacaaataatatagcaatcttcactgaacttctcctacctgtaaagcaatatgtgttataggggatacagagatatttagggcctagctgcatttatagtgtaatgggatgatatatgtataagaacttctagcatatagtgtaaggcaaggcaagatatgtgccaaatcaatgtcatgatcagcaaattctaatagatgaacaaaatgtacaaatccctacaggtagagttttggagataggttctggtttgagtaaagaaagatgggcagggtagttggaatggagttggtaagggcatgaataagtttacaggtacaatgaatcaacacattggttggtggagcacgtgctggagaaaagtttgggacattagtctggaaatttgatactgacgccagtctgtggaaggcaaactgaggattgcaaaataagtttcatggtgatataatactactgaaaatttttgagcagttatgtgatatagtgaatacattaagctttaggaagagtattatggcacctgtgtgaacccttcaactagtatatatgctgtatgatgaagggactgtcagtcatgcttctcatgatattctatgacacatggtacatgtctagtaaaatatatgttgagtaactgaaaaaaagaagaaaatgcccggaggaagtgaatcaataaatcttgtagttttcttggaccagaggaaataagcttatgttccagaacaatggctcccaaatggaggtgatttagcctcccaagagacatttagcaacacttgtagacattttttttcacaactcaggggatgttactggtatctggaaggtaaaaggcaaggatgatgctaactgttctacaaaacacaaaacagcctctcaagacaaagaattatccatccccaagtgtacatagtgccaaggttgagtggaccagatctagaaggaaggcagtcaaaagagaaaaaatagagataagacaaaggatagctgtaagaacttggtgactgctttcatacagaggagcaaaggagaacaaaggccaaagattacatgggaattctcttctgggtcactctggaatcgtgacactacaggcaaaactggagcccagaaaagaggccaaattgttcatgtctgtgtgttggtgagtttggtttagatttgcagaatttatgaaaaaggtaaaatctactaatataattgtctattggatgctggggatgctggactagaagttaggggaaaagttaggactaatgttctaactatggtggctgacaaagctgatatgagtcttaccttcatggggagttcagtggaggaggtgggcattaaatggatagtctctagtatatcagtataattggaaattgtaagttctgtaaaagaaatgtatagtttctatgtgaaagcataacaggcatcatcaggacatatctgtggactgggaaatgcctctcttagcaaatgacatttatactgaacaatgagtatgactgccaccaggcaaagaacagggagaaaatattgaaagcggttgaaatggcatgggtgaaggctatgaggcagacaaaaataggtgggtttaacgaacagaaggaagtgaatgagctgcagagagaaaagggtgggaagtacaagaggttgaagaaataggcaggggatgagcccagggttcatgctaaaacttctgaatataatccagttgtaataggaaatgattgaaaattttaagcagagaactgagaaaatccattttacatttttaaaagaatgtattttatatttttacaattttaaaattggttattattcatatatggagaataaattggaggatccaagagtagaaatagggagataaagagttggctattgcagttggcaaggcaagagataacggcagcttggactaaagtgataaattgttggaagagaaatttgagaaaagtcacattattcaagtgacattcttgaagcagaattcttggggaggtgatggattggataagaagaataacagaaaggggagtattcaggttgatagctctattagtctcctgaggctgctgtaacaaatgaccacaaactgggtggcttacaacaactgaaatttatcttctcacagttccaaagggcagaaatccgaactccaggtgtcaacagggccacacttccactgaaggctctaggagggaattcttccttgcttctttcagcttctagtggctccaggcgttcgttggcttgtggctggaaaacaccaattttctcctctgtctacacatagtcttctcctcttctctcacttaaatctttttcagcttttctcccataaaaacatttgtcattggatttaggatctacctgaataaccgggatgatataatcttgagatatttaattacatctgaaaagaccctttttccaaataaagtcacattcatggttcagggatatggacatatcttttaggggacatatccctattcactccactacaatggctatgtatctggctttaataattgcgtaggataagattgaagaagaagcaaagtttaggggaaggatcaagagttcagtttagatacattatattgagatgcctgtgaaatagtaaaaagaagccggatgtggtggctcacgcctgtaatcccagcactttgggaggccaaggcaggtggatcacttgaggtcaggccagcctggccaatatggtgaaaccctttctctatgaaaaataaaacaatcagtccagcatggtggcgcatgcctgtagtcccagctactcggaaggctgaggcaggataatggcactccagcctgggtgacaaagcaagactctgtctcaaaacaaaacaaaacaaatactaaggagagatgtcaagtagacagtttaataaatagttcagaagaggttgatgtttgttattcaaagcctgggatgagtgagattgctgagggcaattgtttagtgagaaaataaaccacgattgttatttgaaaattccaagtttgagacatatagtagaagattcggagctagcaaaagagttcaaaaatgaactgccagagatgtggaagtgaaaagaagagactggagtacttgaatggtggtgagtaaaggtgaacaatcaggtttatgcaaagtttcatcaggtacgtatgtaaggaaagaaaattgagagtattttaagaaaagaggggttattcctaaagagggaaaatttagcatattcagcatattcatattcagcaattgtaatagtgattacaactaccaatagaaagaggcaagattagattcttgactattgaaccctggtgtatatctgtattttgatatcaaaattagtcattaaaaaggagaaagagaaatcacaggggtgcaatagcaataacgtagaactcctaaatttaagggaagtaaagttaacttctacatatactggtaaaatgttaaaattggatttctaaggagaatgatgaaataaatgtgaataacattaaagttaagtgtgaaacttggagctgctcttcaagttaattacatatcctaaaagtgggtgttttattatgaaaatatgttccagacaagaactccagtaactagagtatcatgatgggctgaacactggaaccttgggattctctacttctctgctatgaacttgctgtgtgactttgggtaattcatttcacttttctgagcctgactcagtttctgcccccataaatagttttgagctacataatctctgaagttctcttgagttctagatatgatgactcaatgtcactttcaggccttctatttggctgtatttagatgtatttctatgaggccctttcaagttctaaggctcagaggcataggaatctgttagcctgacacacagactcaggctggatggtgagctttgttctttcctctggctatggccataggcactggaacaatgtccattgccatggtcattctcccttctcattggagcaaagcctcttccaagtcacaagctaggttttgagtactttctggattttcgttatttcacaatctttatcttgatcatcaggaagcttcttcttttaaatcctcaaaacatgaaagttctgattagaccatgtacatttcctgatgtacatctacgcactcacatgctaatggatgctaccctctcagttcccatggatcttgcacacgccctttagagaatggctactctcttccatgacacaaagataacttacccaaaagggcaactccttatagttctcaaggtgatctagtgccttttgttagcatgcagaatcaaaaactataattttcatcagagcatcttgatttagagaagttttacccgagggtttaagtttgtttaggagatcatgatttctcttaaattgtgggtgtgtatgtgaaaatgtgctttctttaaaaaagagaacgatttactttcatcagatcctcaagtaagtcacagcccattaaatattaagaaccactgttataggtttcctctagccaggacaccaattcttacttcagccaaccgtggaaaagttaagggtgctacatgacagtaggtatggctacttaagctgaaggaaaatctgtgagacagtatgtggcctattcagtaaaatattatatttcatatgccataagcatggaaaggaataagctcttacatatttctatttctagaacattagttcctttacgaggtaaccatcttaggcaaggttgttattagtttccaaggaatcagtggagaggctcatgacaaagggaagaaggggctgcttctgcttacagagaaaattatgtggaatttgggattttcatatactttcataatctgactcctcccatttaactgtttatttatttatttatttatttattgagatggagtctcactctgttgcccaggctggagtgcagtggcaccatcttggctcactgcaacctccgcctcccaggttcaagcgattctcccgcctcaacctcccacgtagctgggattacaggcgcccaccaccacgcccggctaatgtttgtatttttgtagagacagggtttcaccatgttggccaggctggtctcgaactcctgacctcaggtgatctgcccttggcctcccaaagtgctgggattacaggagtgagccaccgcctccagcctaaatgaaccacttctgagactgcaaaaattgtctcactgtttttatgcgttatgacacagtatttttcagaaggacaattattaaaaggcatgaaaagactatttgaaaaggttaaagaaataggtttgttttaataaggagagaatgataaacagccaatatgaatgtttacatgtatgagagaatacagggaattaaagcagatgtttttgttttcaactgatataaaaaattaggagttagtctttcattttaaaatggaggcatatgtttgacttagagaaagtgttgactgtagaatgttactaaaggagtttgtagaatctcctttttcagatatttttaaagaatagaaaatggtatcgcttgacttgggcagattcttgcctaatgtgtcctttctaaaatacaaccacagacatcagtatcatttatggtagagaatggggaggcttactctccgaattcatgcaacaaacatttatggagcctcatgatgtaccaggcactaggaattaaacttccaattcaatgtccccatgcaaacagatcttcagatagataggcagatagacagtggaaagggaatgtggtaaatgccatgtagggaaggggaaagactggcccagtaattatgaccacctttaactgagtccaggcactgtcaggcagtgtccaggcacagtgtcaagcactccatgtacattattttatttagtgctcacaacaaccctatggaatatatactatcatttgccagctattatccatgaagaaactaaggttaaggagagattaaataacttgcccaagatcacgcagacagcaaattgcagagattgttttgactgtagagttgaagttcttaaaccctgggccagccagtcagaatctgagaggagacaagtaaggttggtgaggggaatgggaattgaaagggatgaggaaagccttctgaaggagaagccatttcaatggagttttgaatgagcaggagttggccaggtgtattttatccggggggctggtagtggaggagaagacatgtttgccagataaagcagctgtggaagggactgaatttcagtcacttgttatttagctaaagacatggtcattctaaagtccctaccgagttcttgcacactgataccagggttttcaatgagtagtgctcagtttataagagttaagaagtcaccatttttttttcttagtccaaatgaaaatagtgcttcatctgagatctgcgtatgaatggctctgcctgtctttggtcaacccattttccactccctttacttgtcccttctttccctccggcctctaactctcttagtccttccttcttttctctgaaatgaagctctctcctacccatagagaacacttcctcctctggttcaccaggaagtttttttgggcacagcttcatggcctctcacagtgatggatccttatttaaagcctgaaatcgatttccccatggcatcacaatatctatggccatgcttccctctcaaacatgtgcatttacttttttttggaaggagagaggagcaaaattcataattcttttcttctttcaggccttttaatagttccagttcttctctggtcaatcaatccccatttagtggaggcttaagctccctccagcctgattctcttttatacggctgcctttctgatgtcgtatatcggtacaaacaaataaacataaagaggtttggtttttcttttttcagtttgtttcttctcaggaaaataaattctatttaatttttctgactccaatatactcttgcatgtcatagaatcttgttttataatcagctattggaactttagtaggtctacaaacaaccatttcctttcctaactaaaatcagaaccaattgaaaaagagaagaggagtcagaccactgcctcacagacagtggattttaaaatgtggctttagatctgcagtcgtcactggcctccaacacgtaactcctgaaagagactgtcagagcagtgatgccaacgcagacccggggaatgacaggacttccccagacagtccccaccgggcagagtctgcccggtgagctcattccctctaaggaggagtgaatcaggacagctagagctgggactgacatgttgaagcaagtttctgcacacagaaataggaggccagggtaaaggaaaatcctccatgttgagatgtggaaagaaacctgatttttgtttgtctccctttataacattaattcccattcctttcagattagactttcatgtgttatttgtcgtttacataatgcttttgaatacaattatttaaacctttttctgtctgtctcacatttctcggatgagatattctcactttcctcttaagggtattttattgttcttgtgtaactactgtcaaaaaataaaaatttcaacaaatttagtttaatgatctaaactattagtgattcattaatcagacggtatcccatctatgaaacagaaaagcacgctagtaagctgaggagaggcagtgggctttataggcagaaaagcctgaagaaagcagaaacaggaacagaaagccgattggttgtttcaaagttactttctttaaaaggataaagcagagccaggggactttcttattatgtcagctcaggttgactgggccccttttaattgattgctgtgaatctgttttttgttgttgttgttttgtgtttttttgggggtttttttgtttgttttctaactggctgattttaaagtccagtttggggacctagcactagtgattccattctggtttggtctgttcttctgggcctagtgcaagagcttagtccaaaacaatagcctcccataaatttaacactactctcagtaaaaataaccattggtatttttatagcatggcttttaataatgcctatattctcatatttgcaaagtgcattttcctgagctgattttatcagtggctttacttccaaaataatttccttttaggacaatatcagaacggcacatacaagtgtccccaagtcatatttggaataagatcacttgggaacacaagtcaaagaaggtatgtaaccaactcacctcatctaatggaacaggtttccctgggcaagcataagattattgtacattgttcaaagatttcaagacagatagcgtagatttcaagaatgccaaacataaggcagagaggagtctactgggatattttcccgaattgtggcttgtatctctctctggtctattagaagacctcctgcatacccctaacaagagaaaaaatgacagatgaaagaaagagagagagagagactttcttgtaattaatctaataggcatttttaaaattgaacacttggacttcctccaactggcatctttaaaacacccattgattaacaggcaaatgggatgagtgaattcattataagaagtgaatcctttgcgtccaccagattcttctgccttcattgtcatcaaagttcttgggctcactcactggctatcatccctctcactcatctctaaaatggtttcaacatcccctctgtgcggtccagtttctcacctaatttgcattaggctgattcattcattcctcagcagggttacttgatgtgctttcttcccagtggcatccatgtgtaaagctgtctctcactggctcttatcacagtcagattcaaaatgctcatttcagaaagactgcaagtcttaatagaaggtatagaatttaacaacatgaacacagtgaaagtttaagaatggtttctggaatacctgaaatctattctgcttatattaaaatggctttcggcagagggtgaaaaaccctgccggcaatcagagcattctgtgacattcaagtctgcccagagtcagcagccaagcagcgtgctctctgatctacagatttgcattgttcactaaccttcctgtgccaaaaacactcagttgctccctttcaccagcctctaaggtcacaagacagacagttctttcttgattactcaaacaaatacacgtctgattcagagcggggaaaaaagagttgccaacagtcaaggcttagaaaggccagggctgcttgcacttagaagccagcctgatgaatcaccacatccatgactaattgtggggttcaagtgtgcccagttatagagcctgttttttagaaaggaaaatgctaaagaagacacatagaaatgtggaagaaaactagacacttttgtgtgactacacagatggcccgtggtcattaacaggcttgatacatacctttctctatatatatatagtttttttttttttttttgacagagtttcactcttattgcccaggctagagtgcaatggtgcaatctcagctcaccaaaacctccgcctcccgggttcaagcaattctcctgcctcagcctcctgagtagctgagattacaggcatgcgccaccatgcctgactaattttgtatttttagtagagatggggtttcttcatgttggtcaggctggtcttgaactcccaacctcaggtgatccgccagcctcggcctcccaaagtgctgggattagaggtataagccactgcacccagccctctctctatgttctttcaattaagccccagaaaatgtggaaatgccattgccctcaacctggctttcctcacaagagtaaacttcatgggcttaaaaaaaattccaaacattttttaaatctcataaggttaagaaagggcagtcgacttcaataaattatgatgctgatgatttttgttttaaaaaactggcaaaaacagacttttacatatatatgactatcatatatgacttttacatatacgtatataggtgaattacttatatacatataagtacataaagtatacagttacatgtatgttaaagtatgtatatacatatctaatgtaaatatacatatatatgcacatatgaacctatatcttcattgcatgcttatgtaatagatgcagtgtgtaatatgtgtaaatccatgttttatttgtatagataccaaggacatgataataaaaatgacatagttcttgtcctcaattgtatagtctgttgggaaagaaaacacacaaatagaaaaaattttcatatagagaatttttaatattctctatatgctgctataaaatcaatagtagtcatgcacagggtgttgttggcataagggaggaaaccttgaaaaaggggtacatgttagggaaagctttgggaaagtgagagatgagctgatctgaaaggacttgtagtagtgactcttgttgagtgggagggaggggtaggcaatgaatggaggaaatcccaggtagaggaaaaagagagtaccagaacagccccacatttatttaagaaattgaaattatagctaaaaacctccacacacaaaactccaggcaccaaagttttcatggttaaattgtaccaaacctttagtaaataaataaaaccaattatacacaaactcttccagaaaatttaagacaaggaaatacttcccactttatctgggagggctgccttaccttaacccaaaatctagatgttacaagaaaagataactacacaacattaaatatcccacataaacataggtacgaaaaaccttgagaaaattatagcaaatgaaatttaacaacatatagaaagaataatacatcatgaataaatgaggtttattatgagagtgcagggcaaacatttggaaataaattgacgtaattcaccatataaaaaacagacgaacatctcaataggtgcagaaaatataattgacaaaattctatatagattcatgatagaatgaacagcactcagtaatctgggaatagatgggaattcccttaacttgataaaggcatccatttaaaaaacaaataaccaaaatactatagctagcatcaaactgaatgggaaatgacaattcagtgcagaaacaattggtgttgaaacaatttgatatccacatgtcctatagtttgaatatgtccccttcaaaattcaggtgttaaaacttaatggccaatgcagtgacattaaaaggtgggtcttctcagaggttattaggtaatgagagctcctcccattacgagtgggattaaggccctcataaaaggagcttcactcaacatttgaccctcttgccctctgccttccaccatataaggacacagtgttctgcctctcctgagtaagcagcaacaacgcaccatcttggaatcaggggacggccctcaccagacaactaaatctgcagacaccttggacttcccagcctccagaactgtaagaaatagatttctgttctttacacattatccagtcttgggtgttctatcatagcaacactagtaaactaagacaatatgcagagagagaaaaagagagagaggaaggaaggagggagggaaggaggaacaaaagaaagagagatctttaaagcataccttacatacaaatactaactcaaaatggatcaatacctaaaagtgaaatctaaattaaattattgtaccttttgaaaaaataagccacagaatgggagaaaatgcttgcaaatcatttatctgataaagaacttataacaaagatatataaggatgtctcaaaactcaatactaagaaaacaacaatgtaatacaaaaaggacaaaatttattttcgtttggtcactttttaaaaattttactttaagttctgggatatatttgcagaatgtgcaggtttgttacgtaggtatacatgagttgacacttcaccaaagaagatattcatataacaaataattacatgaaaagacccttgagttcattagttatgaagcaaatgaaaaaccctaatgacatactactacatgcctattacaattactaaaatcaaaagaactgacaatattgatgatcacatagaaaaagcgaaactttcatacattcctaatggaaatgcaaaatagtattgtcactttagaaaaacagtttagcagcttcttaaagagttaagtatttacctacaatacaatctagcattgccacttcaaagatgaaagttttatttacataaaagcagatatagaaaagtttatacagcttttctatatatcttccaaaactggaacaacacaaatgttcttcaacaggtgaatggataaccaaattatggtacatccatacaatggaatactattcaggattaaaaaggaatgaactactgatagacacaacatggccaagtgcattataccaagcaaaaaaagccagatttaaaagactacatactggctgggcatggtggctcaagcctgtaatcctagcactttgggaggctgaggcaggtggatcacttgaggtcaagagttcaagactggcctggccaacatgatgaaaccccatctctactaaaaatagctaattagctgggcctgctggcgggaaccagtaatcccagttactcaggaggctgaggcaggagaatcgcttaaacctgggaggtagagggtactgtgaaccaagatcgtgccactgcactctagcctgggtgacagagtaagactctgcctcaaaaataaataaaataaaataaaagattgcatacttttacttgattccagttgtatgacattctgaaaaaaagcaaaactatagggacacaaaacagaactataccttagaacaggtaaatttatttatgtaaagtgtatcttaataaagcatgaagaaaaattaaaatgtcatccataataagaaaattatttaacatacatgaattaccacatcttaaaactaaatcataaaatttaatgtattaaaattttagcattttaatttgttgtaatatggaaagttatctagatcaaccctcttgctgaaacaagctaataatcctgagtaaatatatattcttaaaaataattattgaactgacagggtcataaagcatttttagcagaaatccagaaggtaagtggaattctgcagccaactttcatttttatggcatttgctaattaggatgaatttgatctacaatattttagcttcatgtggtgcaaagaacaaaagacaaaaagtccaaagcagtttataagagacaagtttgaaatctaaatattcagaacatttggaagtaaaatgattcaataaatcatatacatgaatcaaaatctaagtacttggcaggtagtaaactattagcatcactctaaatagatttactaactaaagcattaggagattaaactgatcactacacgatgctaaaacatttaataactcaagaagatataacagttctaaacctgtatgtacctatcaacatagccttaaatatgtaaaccaaaaattgaaagacaggaaaaataaatgcaaataatagtgaggatgttagtatattcctctcatagctaaagaaacagctgacaaaataaaattaacatgatactgatgatttttaaaacatgattcaatgaataagcggacatatatagaacactatatccacccatgtaaattacaaaaacttttgaaacatacagaaaacatattataaaattggccatattctgatccaaaagcagctctcaacaaagtttaaagaactaagccatgcatatcacattctctatgatgaaatttagttaaaaatcaaaacaaaaagataactagaaaaaaacacagtatgtttagaagaaaaccacaactaaataacccatgagccaaagataaaatcataatattacaaaatattcaaagctgaataataatgaatatattatacataaaaactcacaggacatggttaaaatagcatatgtctccatttcagtggtattagaaaaaaacaaaagctcagaattcaagctaagcaaccatctaaaaagtaagaaacaaaccagaaaaacagggtaaattttttaaatagaaaaatgtatatataatagaaccaaaagagccaaatgatggttctttgtgaggataaataaaattgattaaattgtgatgagattaataaagaagagaaaaggtagaagcagtcaaaattaggaatgaaaatggaggcatagctacagttgatgtagacagttgaaagactttgagaaaatataataaacaactttattcctgtaaaatcactacagattaacagattatgtttctattaactcaacctggaaaatgcatctatcctgttctctgaaggattcctaacatttgatgatgctgtcagacatgaccaacaacatcataaggaatgtggcttttcagggtgagataagaagctttgggaagtttttgtagaggggtaacataatctcactttcattttgtataggtctttctggcaactgtctaaacataaaccagagaagggcaaggcagactcaggaaggacaaatagaaggctattttcataaatcgggtaagagacggtggcatggactcaagtggtaggggtgaaggtggagagaagtaattagttttagatattttagaaggtagagccagaggatttactggtgaattgaatatggaacatgagagaaagtaaatacaatgagttcaaaacagtgatttctccaaagttgttttgttttttcttttgtttgtttctttgtcaaagtgatcagaagaacatattccatttcctgagatgaaaaaatccttaggaagagaaagttttaaggaaaccaagagttccattatggacaaagtaggtttgaagttcctatacaggtggacttctttatagtgcactttcctttattgtgcttcacagatattgaaatttttacaaattgaaggtctgtggcaaccctgcattaagcaagtctatcggtgccatttttctaatagcgtgtgcttgcttcgtgtctctgtgttatgttttggtaattccggcaatatttcaaactttttcattattattatatctgttatggagatctgtgatcagtgatctttgatttttatgactgtaattgtttggcagccccactaaccatgcccatataagatgacaaacttaactgataaatgttaagtgtgttctgacagctccactggaaaaccgttcccttgtctttgtccctcccctggggcctctctactccctgagacacaacactattgaaattaggtcaattaataactctacgatggcctctaagtatttaagtgataggaagagtcacacatctctcactttaaatcagaagatagaaatgatgaagcttagtgaagaaggcatgttgaaagccacaataggaagtcctcttatgccacacagccaagttttgaatgcaaaggaaaagttcttgaaggaaattaaaagtgctactccagtgaacacacaaatgataagaaagtgaaacagcctactgctgatatggagaaagtttttgtgatttggacagaaaatcaaattagccacaacatatccttaagccaaatcctaatccagaggaagaccctgactcttcaattctatgaatgctgagagaggtgagaaagctgcagaagaaatgttggaagctagcagaggctgattcatgaggtgtaaggaaagaagccatctccacagtacaaaagtgaaaggtgaaacagcaagtgctgatgtagaagctgcagcaagttatccagaatatctagctaaggtcattgatgaaggtgcctacacctttagtatattcccctcatagctaaataaactgctgataaaataaaattaacatgatattgatgattttaaaaacatgattaactaaatgaataagtagacatatatagaacaccacacccacccagattttgaatgtagacgaaacagccttctattggaagaagatgttatgtaggactattgtagctagagaggagaagccaatgcctgtaagcttcaaaagacagactgattctcttgttagggactagcacagccggtgactttaagttgaaaccaatactacagactattccaaaatcctggggcccttaagaactatgctaaatctatgctgcctatgctctataaatggaaaaatgcttgaataacagtacaactgtttacagcatggtttactgaatattttaagttcactgttaagacttactgctcagaaaaaaagaatcctttcagagataactgctctgtattagtcctttttcacactgctataaggaactacctgatgctgggtaatttatgaaggggtttaattgactcatagttcttcaggattaacaggaagcatggctcagaggcttcaggaaacttacaatcatggcagaaggtgaaagggaagcaaacacctcttaccatggcaaagcaggagagagagagagacagagagcactaaaggggaagtgccacacacttttaaacaaccagatcttttgagaacacactcactattacaagaacagcaagggggaaatcggcccccatgattcaatcacttcccaccaggccattccccagacacatgcggattacaattagagatgagatttgggtggggacacagagccaaaccatgtcatgctcattgacaatgcacctggccacccaagagctctgatagagatgtacaaggagatgaatgttgttttcatgcctgctaacacaacacaatatccatcctgtagcccataaatcaaggagtaatttctattttcaagttgcctaatataacaaatgcattttgtaaggctacagttgtcatacacagtgattcctccgatagatctggataaagaaaacagaaaatcttctggaaaggattaatcattctagatgccactaggaacatttgtgattcatgggaagaggtaaaaatattaacatgaatgggagtttagacgaagttgattcgaatccccacggaaaactaacttagaagggttcaagacttcagaggagggagtaactgcagctgtggtagaaacagcaagaaactacaattaaaagtgaagcctgaacatgtgactgaattgctgcaatctcatgataaaacttgaatagattgggaatctcttcttacggacgagcaaagtgttttcttgagatcaaatctattcctggtgaagatgctatgaacagtgttgaaatgacaacaaaagatttagaccattgcataaacttagttgttaaagtagcagcaggatttcagacaatttcctcccattttgaaagaagttctactgtgagtataatgccatcaaacggcatcacgtgctacagagaaattctttgtgaaaggaagattcaattgatacagtaaacttcagtgctgtcttactttaagtaattgtcacagccacccaaccttcagcagcccccaccctggttagctgccatcaacactgaggcaagtccctctaccagcaaaaagaatatgactcactgaagattcagatgatcacgagcatttttcagtaataaacaatttttacactaagatatgtccatgttttttaagacataatgctattttacactgaacagactacagtataaacatataacttttatacgcactgggaaatcaaaaacgtgtgtggctcactttattgtggtagtctggaacagaactcacaacatctccaaggtatgcctgtatttcatttaggtgaagatatgaaagcggcagttgaatatacaaatctgtaattcatgggactgctcagtgttggagatctaatttgggttcatccatctataggtatatttaaaaagctgaggcctgaataaagatacctagggaacacaggtagagagagcacacaaagcctgacctgcagcattccagtgtttagaggtcaagaaataagatagagtagtggactagtggccaagtaataaactgggtcaaagatgaagaatgaagaatgccagtggattttgccatgtgggggttttaagggacctcgataagagagcttttagtacagttgttaggacaagacaggcctagagtttagtcttaaaagggaacagagaaatgacgtggttgttggaggagaccatagagacaaagaaggttcatttattcatttttatgtttaagacaggagataactgtcctatgttgtatgatgatggaaatggcccagtagagacagaaacattgatggtttctattttttccatcttgtttggtttggtctttcagaatttaatacctaatgaatgactttttttaacttttattttagtttcagggatacatgtgcaggttggttctatagataaattgcatgttgcgggggtttggtgtacatattattttgtcacccaggtaaaagcatagtacccgatatgcagtttttcaatcttcacccttcacccaccctccacgctcaagcaggccccagtgtctattgttctcttctttgtatccatgtgtactcaatctttagctcccaattataagtaagaacatgcagtgtttggttttctgtttctgcattaattcatttatgataatggcctccagctccatccatgttgctgcaaaggacatgttctcattatttttttatgactgcgtagtatttcatggtgtatatgtaccacattttctttatccagtctactgttgatgggcatttaggttgatttcatgtctttgctattgtgaatagtgctgcaacgaacatacgtgtgcatgtcactttatgatagaatgatttatattcctttgggtgtatacgcagtaatgagactgctgggtcaagtggtaattcttctttgagttctttaagaaatctccagactgctttccacaatggctgaactaacttacattccaaccagcagtgtataagcgtccctttcctccgcagcctcgccagcatctgttattttttgactttttaataatggcctgaatgacacatttgaattaattagtttgacaagagttttaaaatatcaaacacactttcccacagtgttcattttgtttatatttgcttatctcagtaaattgttaacatgtagaaatgaaagcttaaatgtataatgagccatatctctgcatttattcaaagactttaggggtcaaatttgcttattaaactgtgtgacaaccagttctgtttttgaaatgtttaaaatttatcttaatgtccactttaggttctaaataattgagataggctatctataaaccctgcattcaccagataatggcctcagtatatcctgcacttggccaggaattgacattcagtctataattatttacttacggaagatttatgttttataagtaaaaacagagagtattggttttagaaatatatgatgtagttaagaaaatccaagaaaagcattaattaataatagaaaaaatcactcacagttattgaaagcatcccgcatgatgggcgctgtgctgcaatctacgttcatgctctcatttactcccctcagcaattctctctggtggtggccactatgattctattttacagaccaggaagttgagtcattacagggggcaagtgacttgctgaacggtacacagctgggaagtggtgtggctggaatttgaggtcatgctttccatagtcatagtacacgaccgctcaagcaggctagcatatggatggaaggaagagaatgcttccttttcataccaatgtctttatgtatgaaaagcaaagttatgttgatcgtattaggaatcagggtgagtaatttctattttaccatggaaatgatgaattaacaaattattttaatgtagcaaaattcctctactgaaagaattagacaaaactccaccatatattcactgtgcatttggaaggaggaggccagaaactgaaaactccaaaagcaattttatgaggcagacagaattcctttgggacttcatattaagctattttcagtagggagtacaaatattttgttgaaaatgctaagaaacgcctttaaaacatttcctaatagggtcatagtggcttgttgtaaagaacagaaaccaatttgccccatgcctgacatattgttcagtatttactattaattttgttctaacaaaagcctacctcagatcaataaatataaatgttgtaaaaaataaatttgataaagattacattttttcatttgatgtaaaagtacttttcacactttttggtaattcattaggatggtgatttcattttaagattagctttccctttccttttgtgttacctgtattgaaaactggctattaccatatgtacttctttacattttctgcagcatgtaattaagagctaaacttatatatttgttgccctttttcacctaatgaagataattccaaggtttgtagagagaaataagaaaccattcaaaccacttgtgttattttgtttgttgctttgtttttgagacggagtctcactctgtcacccaggctggagaatagtggcgcaaccttggctcactgcaaccactgcctcccaggttcaagcgattctcctgcctcagcctcctaagtagctgggacttcaggagcccactgtcacacctagctaatttttgtatttttagtagagacagagtttcaccatgttggccaggctggtctcgaactcccgaccttaggtgatctgcccgcctcggcctcccaaagtgctgggattacaggcatgagccaccacacccagccacattcaaaccacttctgaggactctcctatactctgggtacttaactatgaagtctaaagttgtgggatgtataaaccagctataaagctagacaggctgactctaaagcaaagggtaacattctccaccttctgttttctctggctgtccttccctctggagtgtcctccttatacctatagggatgtctagtgtctgctatcacaatttgctaattgaataggctcgatatcagtcatttccaccttagtgaaaattaaaactgctgtgtattctctccctccctaaagtaattttattttaggccttgtttataatgtgacatgggaagcatttcctctcccacctcctttaaatatattttgaatatcagggattaagtagaaaagatattagtgaagatagactagccttgagaagcttagttatgcacctcagataacacaaatccgtgcatagctagtcccaaagtaaagcacaataaattgcatgaaataatcaatgaatctgaggtgcttgaataatagagtcttagaactggttggtacctaaggatttgttgtactcttccctcccacccaatgcagtaatcttctctgtaagagcagtaacagatggtcaagaacttgtaccactattttggtttttcttattaaaatggctagatttcagaacttcttggcaagctgctattcaaatgcagaaatgcatctgcttagaaactcaaaaataaacatgttttccaaaggaatcaagtatgttctataaaatcctggcctgttcataggatgtggtaagcatgaatttcattacaagttaattctaccatgatggtagtgagcttctttgttccaaactaagaagtgttgagtgtgattggtgatggttggaactaaggggagggagctgagaactgacagatgtatgctcaaatcctggatgtgtcctggcatcaaatttcagaaagttaagaaataatgttttgtaaggcagtttcatctcataattttaagttactgtattcattctacatgaaatccatcattaaactcagataccatatccagtagagtaaatcaggaccaaatacagcctgtaatacgcagagccagtgaggctgggcagcttctgtctgagttccagactcactggcactcagctaaggattccagacactcaaacttagcaagaaataggacaagaagcatggagcatgacttaatattagtctgtgtgcatttctatgtggagcaatacatttgcaatgcttcttaaaatgtaatgatgccacagttttatttttacatacagttattaactttcaaatatattcagcagatgatatgactgcacatattgggatttggtatatataacctttcagtccttttgacagagagtgataacattgataatctccatatggcttaatgtttctttgctctccctcctttcggaaattctctgtgcctcgttaaatggagaagattccattaatattcaatgatacatgaacaagcaattaaaataatttctattctaatctggaaatagaaagtattttctatgtagcattatacaaatgctatatttatgagctatgtgggtactataggcagagatcagtttcaaaaatgagcaattacactgtgccacattatagactgatttgaaccacataaatttcatgtttaagactcactttgattatgttgcgtattttaccattttagagaggtttccttgtgatcctaattctaactcaaaataacctgttttcactttttgcctatccttccaacaatctcttcccaacaaaccaccaccaccaccaccaaaaaaaaaaaaaaaaaaaaaaaaaaaagcttcacaaaggtttttggaattcaaatgggtcttacaaaacttttggataattcaagtgtaaactaatcagaaacacatgggattgaattccctttgagatttacaatcagggtgaaaggacttggcaaactgtaatggtttaacaacaaaagaaatcaagaattttcagcctcacaagcctctacatttcctctcaattcatttatatttaaaagggaagcatatgctagaggctagagtttggaaaactgcctggttatctgatctagtgttctgcatcagcacctcatccaccacccatcaccttaagtttatcttctcaacctgcatgattttgagtgaaaggggagccagaagtgagatgtatgatcatcctactaatagttcacatctgttctgagattctgattgctgtgaaaattcttgtgatagaaaaataatttgttaaattccctcttaaaacctgaagcaaaaattatcaggcttctatttttataatacaaacaattttcttccagaaacattctgatctgtgtactcattattttctaaagtacatatttacttcacatcaggcatacaatggtggacaaaacagctgcctttcttccccgtatggagcttacagtatagtgaatatttcatgggactagtatctacagaaggtgttttgggaagcacagctttggagagagtaatttgccaacattgcacagaataaaggcaccatgagggcccaaggaaggaaaagatttgcagctgtcttggtaagaactgatgataagtggaatcacacaagagatggtttagatataaaatcagcaggatttggtagctgcttgactttgggaatcaaagatgaatttcactagaaagatagttgcgctgatacaaagaaaatacaagaagcttgggaaacacaattgagtttaggctgcatatttgttttatgtgctgtatagcaaattaccacaaacctagcaatataaaacaatatgcctttactctgtcacagtttctgtgggtcagcagtctgggtatggcttagctaagctctctgctcagaagctcacaagctgtaatcaaggttgcattctacattctcatctggaagctgcattctcatatggaggcttgactggggaagatccacttttccaagtttttcaggttttttgagaatttgtgtatttgtggttgtatgactgagggtcttagccttttattggttgcggctaaggcaaactttaagccctaaagggaggtccttgctgcctgggcctccctataggcagttcataacatggccatttgctttttcaaggccaatgggagaatctctagttgcagtgtgctaagagagtcttgtatacttaaggcagtgacaatccaccatctttggcatacaatatacactcatcaaaagagtgaaatcctgcctttgcatattgtattggtcagaagcaagtcacgggctctgcctacattcaagaagagagaattaaacaagaacgaggatgcattgggggtcaccttagtgtatgtcggctctaagtttggatgtgttgtgtttgaggtgttagaagagcctttggtgaacaagtcatccacggttataaactggacaatgtacatctagaatgtttttttcctttgtgaacttctgatagcaattagggttaaatggctatttccttataatatttctttatccagtttgtgctgattacatttataaaataaagagaagtaaaccttatatatgaaaacaaaaatgaaataatatttgtcaggtggtgataaaaataaagcttagaaagatacgtacaacggcaactctcagatagggctagaaagtttggagatggatatttattccttaaagccaaagataaaataatttaattttcttctccaaaaaacttcatagcacagaaattggcagcctctcagccaaatatctcttggaagaagaaataatacctcctgctacacattaacttctgagccaatttcaatctaatacacagaagttaattctagtcagctctcaagaaaatcttgacctacgaatatctatttgaaaaattgaaaagagatgtaaaagcagagccctacagacaatattctaacaattggtgctgcattaccaggtttgttttcttcttatcttatccctaaatggcaaaataaaaggcctagatcaactatatcttggatttatgtgaccaagtctatcaacaaaccaataacatcatcatgcataaagtgagccttactctgtatttcacttctggtggttttagtcaacagccactccattttctaaaggcagaagattgaacaaaagatcagtatattccacaagaacaaataaatccaataactctgtaaagaagaatatccctctgaccaaattttgacttagttacatgatataatcataggttttttaaaaagctacttcatagctatgttttaaaaatctagatataaactctcaaaaggcaaactgtagcttggagagatatttgagacatactatacaacaaaagattaccttttataactagagaacttttaaaatcaataagattaacacaataaaatacatgaaagacatgaagaaatgcagtggctaatatgtttacgaagaaggcttgatcttatttgaaattaaatacaagtaaattaaagcaatgaactatttttaatatgtctaataagcaaattaatatacccagataaagtaggaaaatgagtacttttaagtactggagatggcatacattggcttctggaagacaacaaatatacatcaaaagttctaaaatgtaatgattctttgcaccagcaattccacttccaggaattaatcctaaagggaagaatgtgatttaccttcaaaggatttttaaaatcgcaattttcttataataggaaaaaattagaatgaaagaatattcaatattaggggatttgtaaaacatgttatggtataatcatagcctgccatcataacttttagcctgttttcccactccatgccccattctctcctttctgagaaccactgccagcctcacatctcacaaatagtgttgataccatataaccctttgcacctatccattcccctgtgttcatagctcattaggtgtggatatactaaaccggcctaatcagatatgctcccttggaagttcagaattggaataaagaggctctggttaattcagcactttaatcgaatggcagagcggtgaactcaggtgctgtagtggccatttacacagagaaggggagaaaacagcctccaaagaaaaacaaagcaaaggagccagaaaattagggaaaagaagcattatggtatgggtgctaaggccaaggtcatgccccaaaccacagggttgtgcctatccttgacagaagtgcaaagaaggagctcattttcggacatcccaccttttatttctgagcccttccttcccacatttttttgttttcatttagatgttgcatatattcgtcatttaggactttccaagaatgactttccaatagcactccaatttcttttttggaggttaatcagcctccagaacccaccaccaatttttgtgttggtgatgggggaatccagatgcctccagtcattatggaagctgaagctgacagaggccatgactcctcatccctgctgaaggcagaggataggtccacacctaagctcagccactgatgctctctgactggcctttgagtcataaatagcagcatgctatcctatccacactgctgcgctttccacatctggatactcgggatcaccctaggctcctgtgcatcccacacttatccctcagcgttccattgattttccaacatgaatagccttctaatatgtcacatatgattaagttagctggagtccatttctgtgtttttaaatatacttttattttaaatatatttttaaatatattgatgtgtacttttctttctcacctttccttgtatatgatgccctcttacttcagctagtggaggcttggccattattgtaaggaggctaagcattaaaacagcaatgtaagataaaaagatgtccatgttcagcttttgatttccaaaattagacttgttttaatctccagtaagattcttaaaaatgaggctttgtttaaagaggttaagttttttctgaatcccttaaactccaatttttatatacagatctaggcctgatggacttttgtcctagagttttactagaaaatactgcgtagagacaacaaatgatttgacacaagggatatgcccaatagtaagaaggaagaagaagaaattattctgtcatggaagggaggcacagggctcagagaggaagcagttaaactgatgagatgcctggttcccttcgctgatctagagcagccacactgccatccctgtgccgtggccaaagagacaaaacaaataattaaaaatgcccacagaaagctaaaatggattaaatgagaggttgatgctctgcttctctgtcaacaggccaaagagctgtacagtaggaattacaaaggaagcatttgatgatgtacccaagagggtgccccagtcctcccatagacgatgcaaggcataccagagacccagaaatgtctgtgtggctcagtggggaaatgtggagaggccacaaaaacctagaggggactctgattgggaaaaggaagctacacagcctagggactttactccttgaggcaactggcaagaagtgatacattagaagttaatgccagcgaaatattcaacaaggttaggtataaccagccacatctcagaggacaccagtatagggcctctggggaccaaaccaacccctccgaagcaaagaacatcaagaatgtggaaagtgccctcaactcctgccacatgaggatggatgcaacctcctcctgcacattggaaagaaggatcagggagggaccagcctatggtagcaggaggcacagccaaaatagggctctaaattgctgaaagttatttactcataagagatgaactatcttaacttggaaaagttgtttaccctgacttcacctggaattgaaattgtctgctaaataaaataaaggaaattataaaatatgttacacatacagactataacaaatacccttttttttttttttttttttttttttttttttttttctgagacagagttttactcatcacccaggctggagtgcagtggcgcaatctcagctcactgcaacctccatctcccgagtttaagcgattctcctgcctcagcctcctgagtagctgggattacaggcacccaccaccacgcccagccaatttttgtatttttggtagagatggtgtttcatcatgttggccaggctggtctcaaactcctgtcctcaggtgatccactcgccttggcctcccaaagtgctgggattacaggcatgagccaccgtgctcggccagaatacacttaattcttgatataaacataattgagtctactaagtaagataatagacaagatggtgtgtgtgtgtgtgtgtgtgtgtgtgtgtgtgtgtgtgtgtgtgtgtgtgtggcttacaggcagatattaaaaagccaatatcaaaaaagagattacagatgtagttgggtcctttccgctttccaaggttcctacttctgttcctgcaccctaaattttgtcttccccatctgctctcagatcttatttcctctgtaacttattctgatatataagtagaggaaaatgaaatgggtctagagttcatgtttaaaaagagaacaaaagaaatatgggtgctagtatgtctcatgttctcaactatctcaagccatatgctcaaagagaagaaaaacctgaggaaagtatcaaaacacttgtaaagctcattgtctagtatattacattttttaattttttatttttaagtactatggatatataatagttgttcaaattttggggatgcatgtgatatgctgataccagcatacaacgtgtaatgattaaatcaaggtaattggggtactcctcacctccagcatttatcttttctttgtgttagaccaccaccacatgtgcagcatccctctgggtctcttccatgacaaccctgtgggaagccaggcaagtgagaatcaatgtaaacatgaagttcatgctgcttactgtgtcgtgataatgtccttgtctcccaatcaggagcctcatgtcttcttgccagcctctgtggaactgtggtaggctattaagttaattagcaagcagggtaaagtctcagatcctttgcattttcttttaaccagctctttctaggtgaaagacacatggatatcactgtgaaacttcatgctctgtatagctcaaaattttgcccaaggggaggttccagcaccatctgattagtacatattgctgagaaaaatactaaaggaagaaaatactaataataatatatttcactaaccctcttagatattaagaaatgaatgaaaaggtctatattattgactattaatcacttggaatctctgttgttaaactgagaagtaaactgcattgcctagaatattggccatatttttagtgatactaattaaattgtttgagatagatctgaagacagcagaagcttgtctgggcctagcttccttgaattcttcttccccgaattgctatgtcttggtaattttgaaatatgagttagaaaccatctacttacctaactgatatcattattccagttaatgtttgtcccaaggtatttctcaaagacttaagaaaaatgaaaattctattttttaaagggcctagctcttttaaaaggatatgtttcatggaattctatttatcaacaaacatgtagactacttcaacaagacttcaatgtgatttcatgtgtttattctcctgagtcagatgtgaacaatgtaatcctaaaagattttggggaatggtgacatatgctacttaattcacactcatgagcttaagagaagataagagaatgtcatgctcatgtgtgacaaagataaaactatattctaactaggattacaagaataaaacaccagaaacttgacaacttgacattttttcacagtgcttaaaaataaatgtaataaaactttggcagttaatgtcattttgatttgctttaattttattttcaaacctctattattgaaataataatttcattatttcaaaccttcataggaaaataatagaattgtgctgttgtgtcagtataagacatagtcaacattttctgcaatgaacaagtaatgttgagattaacaagatttctcttaataaatgttttatacaagcataagaaaaatggatagcacaaaaaatggatagcacaatagggtaacattagcactttaacaaataaatcccaacattctaatggcttaatacaattgaattttatttcttgctcatgcaacagtccagcacaggtgctcatggtctgctgctggggccacgatgcatctgtctcatgcagtcatatagagacccaagttgatagctgtgatgtgttctccaaaacatggctttagaggttgccatggaaatcaacatccaactgatggaagaggcaagagaaaggatgcaaaaaccacaccagctgtttaattacctgggtccagaagtaacaggtgccactacctctcacattctattagtggaaattagtcacatggcctctcctaactgctagtaagtatagaaaagttggttttggctgggcagccacaagacaaagctactaagaaagacatagcattaattttatgttgttagccatctctgctataagcgtaagtcaaatagaattttcatttttcttaagtctttgagaaaaacattgggacaaacattaactggaatattgatatccattaggtatgagcttgattgtttctaactcatatttcaaaattaccagatatagcaattcagggaagaagaaaaaggtttaaagactgtgacattcagactgctatattcaatacagaaaagatatttggtgatatttctatccctttttcttaaatgtacattcttctgggatttaataaagtcacattctgatttttaaaaatagtactattaatctcactatagagctctgaaaataatagaatcgtgctgttatattacagcagttattgattgtccattttttccaaagacactgagatctatggaagaaataagcctcattatttttcatttgtatttaatgtagatgcaacaaaagttatatacttctttattatatattttgtcatgcctattaaatgccagttatataagatgattcctgatccaaacacagtgctttatgttattgggattaaaagaattagttaaagctttaagttaaattacttttgaattcatttatggctaggtacacatgaaataaacactctacattgtctacagtggtaattgccaagaaaaagagtatattttagtaacaatttggctaagcgcctcaaattcaaagtaattccacatttaaatactaacactcaaacctgaaagttgtctttaaaagctttataaattgtttctggtgagggttttacgactatggggtgggtggaaaggggaggaaggaagagggactgcctcactataagctgataacaaggttgctaaaaattgctcttatcaatggtctttgcacttaacttgtttaaataaaagaaaaaacttcatgtgagtcatcgtattttgttcactacagcttggcaggtcaccttgttctagcagatagaaactgaatcaatatgggaagagccagaatttggacaaggttcaccaaacattcacactgatgccaggtgggccaagaaaaagggaatgtcctgcctctgaggtatctaaaaatttttatgtttaagtcaagggttttgtgttgtgaaggcagagctttgaatttctaatagaagaagaaaagcagaatatacccagaaactcctgattaaatttatggtcctctaataatattttaactttaaaggagtcagacggcattctagaaaagagccctttggtcaatgctttcctatctatagtttaatcaacccttccatatatgcacatattaagcaaattcaaatgacattaaaaataagttacatttcttattctaacccctgccattcatcccgctttccccccattgtcacacatatgcccacttccacttctgcacataggaagaaagggtgaataaatgtcagaatcaagtggaaagattaatcataggctgttttttacattgttttattctgagtcagaatacgctttacaggacataggcaagcacttgaaatataggactcagaacataagatgcttcgtaggacccaggcaagcacagcaattaaatggaattccacatttttaaggaaagctttttacttttcttcctctttttgtttctctttacttttgcagctcccttcaaaagtcctttctgtgagacacatttttaactaccatattgttcaattttaacaagagttcagggtgaggaaggttatagctgaggcatttacaaggatttcctgtttgtagtggctgctttttcctctttggtaatgtgtttttcacattttttaaaagctgcctgtatgcattaatattacttaatctccatcaccttaagaaaccatatggggcagggagaggaagaccggtgctggctctttccctttctcaatgacttgagacaccttaaccttgcttaactttttctagaaaatgaagatagtaacacctgctctgaattgtcacagaattattgtaaggctcaaataaaatctatgtatttaaggaatcaatatgtaataaagatcttgaagtgttagtagtcgattatatctgagatacattcgccaatatccaagggggacaaagagagctccataccccgggggaaatgtagtccactgacaatttgtccacacaattagaatacaaaatagcaccctatgcctcaacttttttacagtcaaagaaagcatgaggcataaatagtcctgaagggatgtggagtctgtttgctctgcatatgatttgcatatgctcctctgaaaagtcaccgggcaaccgagtaattgtacagtaatgatgtggttaaaaaaacagattgatctacttttattattattgttacaaaataatacatatatttttaaaattcaaacgatactaaaagttacattccctgtcctactccctgtcacttataccatttcccagtttctgtttttagttctgatggtttcctttttgctctccactgtgactgatatacatttatacttctattttttgatgactcaagtttcgatagtatcttctcactcccagtacaagatattcagtacacaaaagatatccttttctctcctgagtttcattttacgtgtgtatgaacacacaaacatgctaacacacatgctcacacaatcttttagctcttgtataggttcctgaattaattgttcagtagtatactaagcctctacttctggtttccaatttaggccctgcatgttgtccaacactagcccatcagtgggattgttttacattcagggcagctgcactactgcctccttggagaacagtgcctcctggagtttagcagtgcacagccctacagattaatgcaggggccctgatcatatttgtattttgttcctgtatatgtttaatcaatctttagaatctcatctatagttggttcattattgctgggaaacaaacggcatttacaaagtcaaattttagtaatgttattcattatataaatgaatagtatctttctctccatatcctttacaaagtcttcaaaagtttctgaaatttcactaggataagttggtggatctttttctcacccattcagtactttgtgggctttttcaaatggcagatttgtgtcttttttaaaactctgaataattttcttctattacagctttgataattttcatccctctgttttccctactcactctttctagaacttctttttccattttttagtgataaaatacacatacataaatactatcttaaccatttctaagtatgcaattcagtggtactaaatacattcataatgttatgccacataaccaccatccatctccataactcttttcaacttgtaaaactgaaactctatacccattaagcaataactcctcattcctcctcccccaaactcctggaaacaactattctactttctgtgtttatgattttgaatactctaagtacttcatgtaaaaggaatcatgcagcatttgtgtttttgtaattggcttatttcacttagcaggtcctcagggttcatcagtgttttagcatgaatcagaatttccttctttttaaggctgcataatagtctactgtatgtatacaccatagttacttatccacacatccactgatggatacttgagttgcttccatggtttagctactgtggataatgctgctatggtcatgagtgtacaaatatctcttagggttctatcaattattttgggtatatactcagaagtggaattgctgaatcatataatgattctatttttaatttttttaggaatggccatactgttgtccacagtggctgtatcacataaattcccattaatggtgcaaaggtttcagtttctccacatcctcaccaacatttgttattttctgttttgtcttgttgatatttgtcattctaatgagcgtgaggcgttatctcatggtagttttaatttgcacttccctaatgattagtgatgctaagcatctgttcacgtacttattgtccatttgtatatcttgtttggagaaatgtctattcaagtactctgctcatttttgaatcaggttgtttgctttttttgttgtaagttacagaagtttctatatattctaaatattatattctgataagggtatcagatatatgacttgagaatatttcctcccattctgtggttcacatttttactccattgctagtgtcttttgatgtataaaattaattttaatgaggtcaatttgtctattatttcctttgctgtctgtgcctttggtgtcaagtccaagaagtcattgccaagtccaatgtcataaagcttttgctctatgttttcttctgagagttttattagtttagatcttacatttaggtctttgatgcatttgcagttaatttttgtatatagtgttgggtaagggcccaacttcattcttttgcatgggaaaatccagttttctaagcaccattgttgaaaagagtattctttctacattgaatagtcttagcaccttgtcaaaaatcacttgatcatatgtgttagggtttatttctgggctctgtattctattccattagcctgtatgtctgtctttttaccagtgccacgctgtattgatttttgtagctttgttgtaagttttccaatagaaaactgtgatttttccagctttgttcttcttcaagattgttttgtctatttgaggtcccttcagaattccatttgaatttttggatgagtttttctatttatgaaaaaaaaaatcattggaattttgaaaaacattgcactgaatttttacattactttggagagcattgacatcttaacaatatgaagttttccaatctatccatgaagatgggatgtgttttcatgtatttatgtattctttctttcagcaacattttatagtttaggctgggtgtggtggctcacacctctaatgccagcactttgggaaagcaaggcgagaggattgcttgagattaggggttcgagaccagcctgggcaacagagcaagacctcatctctactttaaaaaaaaaaaaaaagttttatagtttaacttgggtaactgtataagtctttatgcaactaatttttgcatgttggctttgtatcctgctgctttactatattcatttattagttctaacagttttgtatgtgaggttaatctttagggttttctacatataagatcatctcatctgcaaacagataaatttacttcttccttccaacttggatgcctttaatattttctcttcctacctaatgctttggctagaacttccagtattgtattgaatacaagtggtgaaaggacatgcttgtgttttgatctcagagcaaaagctttcaaccttgcaccacggggtataatgattactttgtttaaattacggctgttattatattgaggtagttttcttctattcttaatttgttaagtgttttttgtttatcataaaagggtgttgaagttaatgaaatgttttgtctgcatcaattgagataagtatgtgtttttttcttcattctgttaatgtggtataatgcatcgattgattttcatgtgttgaaccatccttagacgccaggaatacatttcacttggttgctatgtatataatccttttaatatgctgcagattttggtttgctagtattttgttgaggattttttaatcaatatttacaacggatattggtctgcagttttctttccttgcagtctctttgtctgactttaatatcaagtaaatgctgtcctcctaaaattaatttagaagtgtttctttttcttcaactaaaaaaagtttgggaaagattgctattatttttttctttaaatgtttggtagaatttgcctgtgaagccatcaggtccagatctttttttttttttttttttttttggtgggagattttgaatactgatttaatattctcacaagtttctattcagattttctatttcttcatgatttagtcttggtaggtttcttcttgttgctaggaagttgttcttgtaggttatccaattttttgtagtataattgttcataacacgtttataatcctttttatttctataaagtcagtagtaatgtccccacttctacttctgattttggtaatttgagtcttctcccttttttcttagtttatctagccaatgtttgtcaattttattgatgtttttaagtgattaacttttgatttcattgattttcaccattggttttctattctctattttgtttatctctgctctaatctattaattccttacttctgatagtttgggtttaatttattcttcttcttctagttctttaagttgtaaagttaggttgctgatttgagatctttcttgttttacagtgtaagcatatataactataaatttttccctcaggattgcttttgctgtgtcccctaaattttggtatgttgtgttttcacttttattgatctgtaagtattttctaatttcccttgtgattcttcctctcaataatgaataaaactaggctgggcatggtagctcacacctgtagtgccaacaatttcggaggccaagaagggagaactattgagcccaggactttgagaccagattggacaaaatactgagaccttgtttctacaaaaaataaacaaaattagttgagcatggtggcatgcacctttagtcccagctacttgggaggctgaggtggaagaattgcttgagaccaagaggctgaggctgcagtgagccaagatcatgccactgcactccaggttgggcaacagaggcagactttgtctccaaaaaataaaataaaaaataatggatgaaacaaccagacagaaaataagtaaggaaacagaggatttaaacagcccaataaaccaaccagatctattagatctaatatatatatatagtgtgtgtgtgtgtgtgtgtgtgtgtgtgtgtgtgtatatatatatatacacacacacacacacacacacacacacacacacagaacattctacccaacaacaatgtacacattcttctcaattgtatctgggatgtttttcaggattcactacatattaggctacacattaagtctcaatagacttaaaaaaatagatatctgattaaatgtcttctctcatctctagagaatgaagttagaaatcaataacagaaataaaactggaaaattccacagaattgtggaaattaaacaacaccctcttaaccaagatattgaagtctctattattatactactatatttctcctttcaattttgtcagtttttattttatatattttcatgatctgtgattaggtgagtaaatgtttataattgatctatcttcttgctatactaaaactttcattaatatataatgttcttttgtcccttgtaaactttttaaacttaaagactattttgtctgatgttagtatagccagactttctctatgttggttactatctgcatgaaatatctttttccatcctttcacttccaatctatttgtatctttggatctaaagtgagtcttttgtagacagcatatatttgaatcacgtattttattcattctgccaatctctgtcttttgatttgagagcttatgccacttacatttaaagcaattactgttaagtaagcacatacttctgtcattttgctatttgttttctgtaggccttatagcattttcatccttcacatcctatatcattatcttcttttgtgtttatttttttgtagtgaaacatttaaattcctttcacatttcttctgtttgttttctatagctacattttgtggttatcatggggattacacttaagttcctaaagttgtaacattctaatttgaatttgttccaaagtaacttcaataatacacaaaatctctgttcctttaacaacttcattctcacccctttcaattgttgatgtcacacaattatgtctttatacatgatgtccaaaatacattaataattatttaaatggtattagtctcttaaattatgttaaaaaatgtggatttataagtcaaaattacaatattaccagcttttagattatttttaatgtattagtcttttaaaccatgtagaaaacaaaagtaatagaccattgtgacaataatattagcttctataattgtctatgaatttacctttattgagatatgtatttcttcatatggcttcacattactctctagtgtccttttattttaccctgcaggacactcccttgagtatttcttgcagagaatatctagttgtaatgaactcccttagcttttctttatctgggaatgtcttaacttctgccttacttttgatggacaattttgctagatataagattctaggttgaccttttttacttttactttttgttttactttttactttttgttttacttacttactcttactctttgttttacttttagcactcttaatattttggcccactgccgttggccttcaaattctctcatgacaaatttgctcataatcttattgagtagcccttgtatatggcaggttgcttttctcttgctgcttttgttactacaaaggccagggattcggtctaggtcccattgcttgctgcaaaagaaagccaatcactgaaacaattagtattgccaaggaagaaggctttaatcaggtgctgcaacctgaaacattagattcaaggcagcgaattttagaataagggcctagacccagcctctgagcttctcaatagccattctggtgtgtggcactctttcttgtcttacacccatgttcaggtgtacactgaagttgtacaaaatctgactcctcagtaaatgagcaagatgtcatagtcctcaggctgatgattccatttctttagacatatacaatgtggattttagagtgagagtaaaaagtcactgtcaccatttaatgtacaaaaggtaagacttgcaactgactttactgctccacagacagtcctttggccaatcaccattttcctgcctggcttccctgcttgctccccttaactgctcactctgagtatgaaaacccttcaaagctccacgaaagaatagctacagctcaggggcagccttcactacatgtggacacctgtgcttgcagaatgcaaaaacaatcactagctgtaacacaacaatgtagaaactaaaataatatattaatattagttttaactgattgaagagcaaaaaagctgaaaagaaaaagttttgcaagtaggtcaaattatgatggctgccatgactttttagataagagtctttgttatagaataattattaaaaagacatggattataaagcttctgatagagttggaaaaaaaaaaccaaattacctattagaaggaaaagtatatggaggctaatcctggggctctatgctagaaaaattaattgttgtatctccagtagttatttagagaggatatttcctgagaaaagttaaaaaatttggagaatctcaaatatggaccttcacaagcatgtgacacagcacagagcgtttgatatgtgttctgtggagttacgaatttttgcagttgttcagtttgaattcctctggttggatctccagggactttagacatggttggaatagatggtcttacagcaataaagacctcatcgacaaaggcctgtttgtgcttttttttcaacaaatctatttaagcacaagtcctgtcattataccctttcaaattctctctagcccatcctctcatctccatcacattgtcattgccttagatcagaccctcatcatttctcccttggacgattcccatagccttctaataggttttcttacctccagacttgccatccagtctatactctacacatcactagaatgatatgggtaacaggaaaacttgatcattaaaattctttaatgtctccatacttcttcagcaaaattccaaaatctttaacataaacaaatacaacattatccctgacttagtctgcctacctcactagtcacttcttgtactccaacctccccaacccatctactttgcttttcagtaacacagaactatttgccacttccttgatgccacctaatcccttgactttatgcatttgtctacttccattttccacacccatatctttaaacaggctctcttccatcttcccaacaccacctgggatcatctcttccagataccatccctaacactacactttctcactcaactgtcccgctccatccaggattggttaggtgtccaattatgttttccacaacactccaaatataattcttaccagccagcatggttgtgatgtttcttctatactttctccccacaagaagaaagttttgtgagggtaaggatcatatttaatacttgtatgttcaccagaaactcatcatacagtttggagataacatttgttgaaggagagaagaaaagaggagagaggaatggagtgaggcagaaaggaaatgatgacgagctactcttcaaaattaagctggataacaacaagaaattctagaaagcaattgaggcaacctccaccctaagacccaggtaaaccctacatttaaagtgctgttctggggcacagtgaaagatttctgccagaaaatttgctccctaggatttacatgatgatgagattacatgctgccttgtggcaacaaaatcaaaagtctgtaaaagaaaaagcgtgctatgcttctgaatgtttggagatcctacaatagatttttcattcagctattttgttgctgcttcatgagcacacctgacagtcttgtgggataatagaaataaacttctcataaacaacggtcaaatttttcagatatatattttcaacacagaactagcaaaatgtacacagtgctaagttgtgccatctctgtactttactacgcaaggcacttctttgataatgtgcagcagaataatgttatagcagatttcacaatgaaatcgtcaatgaatcttctttcagtcatttcattcgggatcaaatcggacatatgcaaagttcttagaatcacttttgtcaaatggggcaaaattgcagaggtcatagcaagtaaggagccatcctcttttataactgctatgcccatccaacaaccacagctttcttaccaagatggtcaccaaggtctgctgcacaggattgcatactccagagcaccctccagtcagtgcagacacaccaaccgctggtcagcctacaggggtggtgtctctgcttcttctgcccaggcaaagctgatatcatgctagagaaaggataagccattgacaccatccccaaaggatccttaagaactagcattgcaatttacattattgaccattcagtgttggttggacacatggtggtaaatttaagagatcctactagccaaacagtccaagccaagttgctctgggataacaaggtactagcattgcaactggtctgtgctgtaacaccagaaggaaactgagtctaggtatgctgtatcaaaaatctatgatgatgtcttccacggtattctctctcaaggccctttgtcaaagaggtcactgctactaggccttccataggagtaattgcaggtaatttggcaaactaggtcttcctaagagagagaaacttgggtagggaatgtcaaagtccatgattcacattctataccacaatcatgaccaaagtgatcataagattggggtggcttgacttacagaggttgttaacaaatgtcccaaggtggtcgcggaggcacttgtcagaaaaggtagtgtttttctttcaagaatcaaaaattgagccaattcaatagaaactccttggtttcactgaccatattgaaaaactccagaaattattctaagaaattctccaaccagtgaatcacatctgttggttttaacacctgaggcaaaccttggcaaccatcaggacactgtcaaggatacactgaaggagcgtctctacacagaattgcagtaaatcgactccttgcaattctgggggcaaacaacacagttcaaatttatcaaatgttaattttagagttaccactggaaaaactaaaacaactatcttatccaattggcactctgtattgtcatctttacatctttactgttaaatcttaaatgttcctggtcatatgaaacaatgttttcaaagaatataggaaccgttcttcattttgaagatgtattcattgactatgtgataaaggaaaagccttcgggaaatattcattgactatcacatttaaaccagttatgggtatggaggaaagcaaaaaatgcaaaagttaaaaactttatatctctttctaaagttaccaatattactggtatccaatctatctaaaacagcatgaatgtaatatatagttaccctactataaaggccaagcaagaattttaacctctttgacagctcctcaatttccaccatgttttccactgcaaaggtagtcacttctccacccatagcagtaacactttctgtggccctgacctcagtaggaacaggactgctatctagaaagaccagctcttgatgtttgatgtccgggctatacccccaaaacaatgaaatcagcagtccttgtggtgggacaaggagagggctagacaccgaaatgcacctaaaattttccaggtgattctaatgtgcaaccagggttgataatcactgggacagtctaacaggcccacaccaaacacagtgagagaagtaagcaaagggaaatctattccttgcccttaagaaatttgctggccaggctcggtggctcacacctgtaatcccagttctttgggaggtcgaggtgggtggatcacgaggccaggagatggagatcatcctggctaacacggtgaaaccccgtctctactaaaaatacaaaaaattagccgggcgtggtggcgggagcctgtagtcccagctactcgggaggctgaggcaggggaatggcgtgaacccgggaggcggagcttgcagtgagccaagatcgcgccactgcactcctgcctgggtgacagagcgagcgagactccatctcaaaaaaaaaaaaaaaaaggaatttgccaaaagtgaataaacaactctgtaggcagtggacatcttctagagtagctatccgctcctccatctacaggctgcagtaggcgtggtttaggcagctgtttgtaccacactaccctgccaacaacattgattgaacagaaggctggatatgcagcacaaggcaagatgatccaatccctttaaatttggaataaagaccctaagtctaattcagatatttgggggatgttgagctgaagcataaaagcagaaatgataaagaaattggaagaaattaaaaatttggaagagagaaaagggaagaaaatgaaagtagacatgcctaagaaagagtcagaggggtactgtatgatcctgagagtctgagagagctgcctaggcttctaagaggtttccagtttacatcatgaaaggcccgtttcttggactttgtaggtttacaataccttctccttagtttgagacaactgagtgggtctctgccctttgcaataaaaaagggtatcctgtttaccttctggtttccagttcaattctcacttgaatcctccatgtgtttaccttgtttccgaaaatgataagagcaatgagagttcagagaagtgggaaaccaaagggcgccggagtggtctgaggaggtttcacaaatcatgtggggattgaactgaatcccaaaaaatggaaagaagggagctccctcactccgggtgaaggaaagagtagtacaaaatcacagaggcaggagtgtgcccaaggagactggagtctacacagaaggatgtgggacgccagaaaattaatttaacctggtggagtgaacctaatgaaagctcagcaacactagctccatgctccttctacttcttgacgtatcctacaggtaaaaagtcctgagacccagcaggttttaagaaatgcttcctaaactcttttatatatatatatatttttttaattttgagacagagttgcgctcttgtcgcccaggctggagtgcagtggcgcgatctcagctcactgcagcgtccgcctcccgggttcaagcaattctcctgcctcagcctcctaagtagctgggattacaggcgcccgacaccacgcccagctaaattttgtattttcaggagtaatggtgtttcaccatattttccaggctagtctcgaactcctgacctcaggtgatctgtccatcttggcctcccaaagtgctggaattacaggtgtgagccactgctccctgcccataaactcttacatacgttccatgttgcctcactactttaagggaaaacacattaataataacaaacaaaaagtaataaacaagagaaaagcattgatagcaacaaacatagttgcttgcctgtttctgtcaaaaaaataattttgtacacatcaatggattcttatggcctgttttattcttcgcatattttggcagaagttggctgttgagaatacattttacttcatttttcaaagtaattctttttttaaaaaaaactctttaacttagttgcataattacatacgtgactaggataatagtctatgaccatgattggtgaaaaggtagtgtattttagtattaactacaacttaaaaacattatgggtaagattaattaaatgctgtgaaatttgccataatatttaccatcagctggaaataaagagaacagagttgtaagtattatgcaatcattttaattcaggcccattcccataagtgatacagacctggaattgtagtgtgaagtcacaggcaggctggcacccagccaatacacatcagcacaccagcctaggactgtaccatgccagtgctccagactttgactttcatcccaactcacttccagggaccttttcaaagatattcagtagacagcctgtattttctgcatacgctatacccggccctcaagttacagacagcccaaactaaatgggatcttggaggttagttgacattttaccaatgagacaactaaggtaagataactgttaagattaaggggaatgctgaattttcatttttctaaaacaaacaaacaaaaaaagtttcttcttccagctaacatctcaatcacgtacccaaaatgacttttaaaaatttcacattctttctactaagatgccagcggcagcagcctactccatacgtcaggcagtgtttgtatatatttcagcgtatccaagcaaggcctttttaactttccatcctacagacgaagctgtactttcctgaatggcagccaggaaaaaacttggggatttggcaggaagactgtgggaagcctggtgttccaccaggctgagatctggagcggagctttctacaaagacagaggagcgaaacacctccctttgtttagctcttcataggagcacaaatggagcccccagattgtaatcaggccctattgtataaacttggggttttcaggccatacagcatttttggcagcaaatcccttattatttttcagctggaaaaccaattagcattctttttatatctgggtgttaatacttgggccttagagcaattttttggccactggcccacatggctgtagtctcttgggcaatgcctgacaaattgagataaaactgttacttcatgttttcctacaaagacaaaacaaaaactgtttcctgctcttattaattggatgaagtcaatttccacatttaacaaataagaaggtaagcataatcagggtgtcaacccacggctcttatctctccccaggctggttcctctgcaggaatgtgagggagcaagacttgtcaggttctgactaagctttccttttattggaaaaataaaaagtcctcctgggcaacagagacctctgtcaggtgaacaggctgcgaccaccacaaggtcaccctttggtctcagtggcatttttgcttcacaagtctgagcgatgtgatttacctgagggaaagaattgttaggagattccagccatgacaagtggattagtcataacagtcaagaggacactgcccagtttgagaggaataaacagagccaaacatttccctatctcgaaagcatagcaaagtcaagttcacgctccgggaatgtagtttacgattagagaaagccatatctgggctgctgtctcagaatatctaagcgagtagagaagaggaggaaaggagtttggaatggctgtgggaggtgcccatcctgttaagtgttcccctatggtaaacaacccctgccatggcaacacaacttcatgctgcaaatcagaggagcgcagccctccagcgagcagaccacaacttgggaaaatctccaggatgatgcaaaatatttcaaagggaagtggtaaaacaaacagaacggaaacacagccatacaactgcagtttgaagacaaaaatttgttaggtacaaaaaatagtttgggtgcaattacaggagcatttttgtgttgctggtactgattgtacatctctttgatagaaatggcctgaggggttgctgctccccttcaagactttctttgtaagtagtgggcggtggcatcatttaaaaaaaatccacttgaaagacttctttaaagaatttgtacagaacattttctttgcaagaaaatctattctgaagcaatattatttaacaacggggctgtgttttgagtcatatgaaaatttattatccaattttttcttattgttatatttgctatcaagagcagaaaatgatcatctataataatttagaggagcgactaaaaatgcccaatcacgcacaggaaaagaagcacttgacttgcatctctagagccagaaatcacccgattctctatgcagagggtggccatacaccgcagtttgccaggagagtctcagttgactctagttgtccagatttaattaccaacagtgcctctttcactgacagaagtgttctggtttggatagtaaataatttggtgaccctattgattcacagagcccaagaatcttctgtctgctcctactctccccggggacatcagtctaagactctaaaaatcagaacgtaaatgcaaaatgaaaaagagtcgggtggggaattgctgccacctggtaaagaagaaacctcgacagtttggcttcacctaaaggaagcatggaaggactgtgaacaaaattaaccctgtgtgtattgaggagaggagagtaccccccttcatagagaccccctgcggcagcctttaggaatacctgggagcttcccactggattagacaccaaagtctaaacaagtgctcctctgtcaaatcctggaaggcggacagtcatttcaaaagcagacatgcatgctgcctctttttgtgccttgcagcccagaaagtattgctcagatgttccaaatcagaaggtgttcagccacttcatactgccaccagccatgctgctgggctgcagctatttggatcagaatggaactctttgatctgttttatatctaagtttaactatggcctgggtccaaaaggtagactaattttggcaacttcccctgtacacttttatctagagataaaaggaacacttggaagcataaacagaaggtgcatttctgtaggcccaatagccagcacatcaaaacacaagaccatagaagctggtgctgaatattagttctgattttagaatgcagctctactctgctacctcactcactggcagccagtaggaccatttccttctattgtaaacatataaagataacatagcattacagaactcagaaaggaaagactcatttccagcacagtgacttccatttttacatgaatttttaaaattgaaaaccatgatttttaagttataaagtaattacactggctttgggtccaggagtccaaggctctcatacaaatatgtgggtgactggagacctgagcatcgatactcttccaacctccctgtctctcaagcggtctgtgctttaatcaggaatttatggcttggtaagcccagttaggagagtggaacataaatccccaggggcagccagcttggagctccagagaagagttatagcttgcccatgacctttgcactatgtgaatttgtcagtgaaggaccaaatgagagaaatgcaaggcctggcagggtttaatgtagcccattttaacttatagtcagagctactgtctattccagaataggacaatggacagtggagttctaaaaatagtaaggtgatttttctatagggacatgcagctgaatacacagaggcagtttagctgcatgcaaatcagataagctctgagtagcagtatttggtaccttattgccaaaccagtccattctataagaagtacaatcaccaaattggaaggagacatttctagtctttccttgctaggatctaaagagaccagtgagtttcttgaagggctcttgggacacataggacctgactgacagaataatgtgacatggcttaaacacactaacatgaccaactacccccaaatagtgatttgccaaatggagatgaactaaccaggccagtgctgggcagttagtggaaaggaataccacagagtttgtgtataaaagggccctaatatagaacagtgaagtaacactgggacacattttttgtaggtcatcaaatggcatcacagaattaatttgctgaaaaatacataatattaactataattcctttgaatgaaattaccttgttttgttgatgtaaaaattgagaaagtagtaccatctatttgggttttcagtggggatgttttcccagtttctgggtaaaaggatatgactcacggatgagaaatatgaaattcccattaaactgtcctggttggccaggcacaatggttcatgcttataatcccagaactttgggaggctgaggcaggcagattgcttgtgcccaggagtttgagaccagactgggcaacatgacaaaacactatttctacaaaaaacacaaaaaattagccaggcatgcctgtagtcccagcttctcgggaaactgaagtgggaggtccaggcttcagtgagctgtgatcactccatacattccagcctgggcaacagagcgagaccctgtcttgaaaataaaaataaagtgtcttggccatctcagaaatcagaattccacataaagtttgggaattgcattagatcatatctaagacctctttcaaatgcaatttttgcatagcaaggatctgaacagtcttgaaaggatttccttttatgttcatttcaaaaaaccctcagaaaagaaaaaattgacagcacagcccaaggtcaagagaataagtaagtacagagaaggctgaactcaagttagcaacagacatgtgattcccacagcctcctcaaagtagttctctatcatgtgaggaagagcttgagccaccagacctgacctttcctgaatattcctctttaacaacaaaaaattattttagttaaacaataagaaccacatgactctactctcacacagtaaaagagtcaatccattagatcgctagactaattcatcacgcatgactaaagaaagtaaatttcaggtgcttttgccatacacacatagttacaaaaggtggcaactatgtaaggggaagaatatgttaatttgctttgctgtgttaattatttcactatggatagttacatcaaaacagcatattgtacacgttaaatctacacaactttttttattttaatttttgagacggaggctcgctctgttacccaggctggagtgcagtggcgctgtctcggctcactgcaagctccgcctctggggttcacgccattctcctgcctcagcctcccgagtagctgggactgaaggcacctgccaccacacccggctaattttttatttcttatttttttgtatttttaatagagacggggtttcaccatgttagccaggatggtctccatctttctgacctcgtgatctgcccgcctcggcctcccaaagtgctgggattacaggcatgagccactgcacccgggctcaatctacacaacttttattaaaaagaaaggaaagggtgcttaagaaaaaaatacccaaaagcaatgaggtaaaaaataaatgaatacagtgtatctatacatatatgggacacatacattacatatgattctgctatgctgtgacaacctgtttttatttgagtcttaggggctggttacagtggctcacacctgtaaatcccagcacttttggaggccaagacgggtggatcgcctgaggtcaggagtttgagaccagcctggccaacatggcaaaaccccatctctactaaaaatacaaaaattagccgggtgtggtggcagacgcctgtaattccagctacttgggaggctgaaacaggagaatcacttgaacccgggaggtggagtttgcagtgagccgagattgcaccactacactacagcctgggtgacacagcaagactccatctcaaaaaataataataaaataaaatatatttgggtctcaaaaaacttttaaatttaatatgtaaacatagatctagttctttctttataataatggaatgttctttaatatagttacatcgacttttgttaatcatagtttgtttctacttatttgctattataatacctatttaaaatagcaaatatgctcgtaaatatgtcttagtgcctataagtatttctgcagaacagattcctagaagtatatcgcaagatcaaagagtaggcttactttacattttggtaaatatcatctattttatacatgctttagtatttcctctgtaggtgaatctttgtatcctctttgtaccttctactcagttatttgtattttttcatatgcaagcactctatatattatattttatatatgttataaatatttctcctagtctgtagcttaacttcatttttatgattatctcacagaactttattttttcatttttatgggggtcaaaattatacttatatgatttatgagttttgcgtattgcttaggaaagctttctctatccccagagttataaatttaaaaagtcttttcttcaaatacttttataatttgtttttaacagttaatctgaatatttttgctttatgttatgaactgagtttaattttttcttaggttagccaattgtcacaatgcaatttattgaaaagtcttgaataattttattgatttgagatgctacctttactatgaacagtattcttgtacatgtctgggtttctgttctacttttttctcttaatgtatttgttcatccctatgcctaaatacactgtttttatactacattctggttattagtaggtcatatcacattgttattctattaaaagttaatttgctaatcattggtattcttttcatatatgagaaccagcgtatcaacatctttacaatgttgagtcttcccattttaaaatatgaaacagaatttcatttatataggtttttaaatacccttttataaaagtcctgcacattttctatttcttcccaagtataaaatgtgttatgttgctattgtgaatgagatttcttttatcattatgttctctaagtcattattgataatgttaatttggccaggcgtggtggctcacacctgtaatcccagcactttgggaggccgagacaggtggatcatgaggtcaggagatcgagaccatcctggctaacatggtgaaaccctatctctactaaaaatacaaaaaattggctgggcgtggtgtcgggcacttgtaatcccagctactcgggaggctgaggcaggagaatggcgtgaacccaggaggtggagcttgcagtcagccatgatcacaccactgcactccagcctaggcaatggagcaagactctgtctcaaaaaaaagtactaagttgtgtatattgacttttacatctggccaccttattatgctcttaacatgacctcttaaactctaatcgttttttatcctgattttcatgatagaaaaaccttatatatttccctaattaattgatgggattttagtaaaacttcaattctgaaatgttttaagatggaccaaccaacacccatcctttgagagcttacataaggctaagaacattgaaggtaccactgggaccccacgggaaaacatgtaactcttgtttgtgaaacacagtcttcctattttgacatagggtttgtgatatggtttggatttgtgtccccacccaaatctcatgtcaagctgtaatctctagtgtaagaggaggggtttggcaggaggtgattggatcatgggggcagattccctccttgttgttatcatgctagttagttctcatgagatctgattgtttaaaagtgtgtagcacctcccctttcactctctccctcctgctctggccatgtaagacatgcctccttcctcttcatctttcaccatgattgtgagtttcctgaagcctctccagccatgtttcctgtacagactgtagaaccatgagccaattaaaccccttttctttataaattacccagtctcaggcatttctttataccagtgtgagaacagactaatacagatgcttgtttggtttggattttttttgtataggtcaagtactatcttacttttctagtaggttttcctattcctctcacatacatacaaaaaaagaattctcatatttaatagccgtcttcattgcttaccaaaagaccaccagtgaagtacataaatatataaattacacaaaaaagtatttttaatactgaaaaaataaagacaagaggaaatcattttcagcttcactgtcacacagcccatttctattcttagccagcctgggtcttccacagaagagcacccgctaggtcagggtttgcttccctgacatggaaacactgcagccaactgcctttgagtgggtgtcccatcagcctccaaggccacatttcctgtgggagggaattcctgatgctggaatccttgctaacttccttttccaaaactgattgcttcatatagggacatgttttctctgcttctataggtccgaaaggacatagaaacattccaatgaacagctctgaggtgatcttcctccattttctttcttacaagctaagggctcatttccttcaacttaatttgtatagagtagaacctttttggttacagatacagatacaatgagagatgtctagatgagaagatgtcatgttctattttgatccattcataatgaattggtttggtccctttgccattgctagctgactgtggcttcctagggcactgtttggagagaggtctgaagctgcctctggccatagtcaacaaataatgtctgtcatgagcatgggagggaatgtagcaggatgcccaagaagcattagccatctttgattataattggctttttgtttctgagcttatttctataaccttagaagttttgttcatttatagatattatacatataatatacatataaaagaaaaaatactgtgcttttttttcttggatcaacaaagaagtttaaacagtccagtgctcttaaatctgggaagccttaatgctaagcattgagtatataaatttatatcctaaataaaactttggccagaatactatattctgtactttcaaaaatacttttgtagttacgatttttcctactatcattaatagtagtagtaattgtagcattactagtaattgtaactctcttaaaacccaacttggtataattttggctggcatataacatcatcagtaaagtattttcacataatactcacaaaaatagagaactttatttttacaattcacacatgctaggtggctaagggctaaagaaataccatgaatgtttctggtttttaccaaagatcagttatatgttttgtataattgagggagtaacacaacccaaaagttagaatttgcatactttttgagaaattagtcaagaaaatagcaatgtgctgctctaagcattagaggttcccaagtctgcgcttcagaatgggattatctgggaaacctggtagagaagacagtttgtttttctttttaaaaagtgttgagctgtggtttagggtattaaataataaaaactcatctctattttccatatccacatatttataatattttactctttatgggcaaaaatttattctttcaaaccaccccctactatgcctcaacatgtctattacattaaaattatctcatatgtagagcaagaagaggaattcacctggaaaattagctaacagtcatcttaacaattgatttccacaaaccaccacatgacacatgtgaatatgctcttcacaggagtttccactcaaatgtggactacaaaacaaacattcatattgataacatgtctttgtgactttcccagtttttaaaagcatgtcaaatagccatctgaaaatacgtttccatgaaatgtaatggtacttctttctagtggtaatatacctatcattgttttccactaagtacttgacatggcctttgtaaataaactttactaaaaaatgaattctaggttgtctgacttgcttaccatcggccagtatcttgttgaggttcacacctcttaggaccgaacacacggactcgaaagatagatttctgctcagagtaacaaatggattcagaaaaatctgagaaatattttttccataatcttgtcaagtagcatgtataaaaggaggaaagtcttgtcatatttcatcatgatgtttatatgcttagtcatacctattgtcttacaatggccctgaaatgcaataacactgaataatattttaaaatgtgttgaggttcatattgggatacaatagcaggaatgttcaatttcactatttattggagacaatgtctttggggtgactaggaagccaatgcttcttttaacttatgttgcatttgcttactaacacatctaacaaagccatattgtaggacttaaagactttaaacttaaattccatgatcccattttaccacaatttttatttttaaaactatcaaaagtctaagataatcaacagcagaagatacggtatgtgtaggaaaactaggacagttctacactcatatatgagactctgcaagccagatagaaatcgatctaagcagctcttctttatcacagcagtgcagcatgtacgttaagtttacgctgtcctccaggcacccctagacaggaatcacagctcaaaaactttctagctatgtgttccagtacaagtgacttcagacatttctgttttgagttttctcagatataaaatgggggtaattatagtcctacctcaaaaggcgatatgagaattaaatgaataaatagacatgaaacagcacttaaaacagcttcaagcacattaacgagtgtcatttaagaactgggaagaaaatatgatgccagagggtttggtgaataagcagttgttatttaggagcatgaattaacaataaaacaatgaaatctattatctaaaactggaaaagatataaccaggtgtgtggtgttgacagttttcagcctttggttcacctagtctttgtatagtaatgtcttgcatgatgcattagactctgacacagattgcaatgcctattcatgtttcacaggactgatttcagagaatttcctaagacacataggctgaatgacaaatggacaactaccaaagacgtttttagaccactgtaatcatttatgaaataatgtataaaatgtatgggctttacattttaaaatcataatggtatctttttatacacaatgtattctctgggttttctttaggtaattaattcagtctggcagaaagctaggcacacattctcagaaattgtaaagaattgggatgattgtgtatgccatctgtattaaatggcattatttatgaaacattagctattagcaagtaactttataattattgtataaagaatgaagctatgaggcaagataatccagtttaaaggccaagtattaacactattaggttcctaacatggccacagcatacagtacaaaacggtatcacagaattttaaaaataaaatagatcttagaatccgtatggtctagcctcctagattttgtacctgagtaatctatgattaatagtaatgtgcataaatcaactagggtaccagctatgatgttaaagaatccccccaaaaaattaggcccctaaactgtctgctagtttttcttttaaagtaatcctaaatacctccttgttgcaaagttcaacacttttccctctaaattgatattgtttggtgattaaattgagtaatatgtttcattttacagacaataggtagaaaacattaggtcatctttgattaactgctaaatatctttcttggcttattgcctctatatatttttcaaatgatttattatagagattctcaatgatttgtgtcagccaggctgcaaagtaaaaaggggctcagctgcaaaatcagggaaaccattagtaacaacgtgaaagcttctcttataatatagcttaacagaatgaaaatggaagtggagtttttttatttagttttgttttattttgcctgtaaccttttcctatcgcatcgctgcttaaaaccacattgccatcttccttccttgaaaagacccaacggatcatatctttgctgttggcacttcttggagatgagcatttgaagataccagctagaacttcacctctgtcaattctaacctaagatttaaataccacatcaccacaggcaaatggtatacatttatgggaaagaaagcgctttatttatcttactaatgtgattttatggatgagtagaatgcatgcagtgcttgcagtcattctgtccaaggatctgtcatgttcagacagagatatctcgtgcttgacggaggatggcatccacgctgcattggcattttattaaatcctgtaaatagcactatactctgcttaaacacaatggcatatcaaaagctgagcgactttcttttccaggagcttccattgatgttaaaaaaactaaaaatggctctaaccactgacagagtgatactaatgagaagaacttgagcattggcaagagtcagaatatgtcaagttatttccgtaatcacatgaatatatccctcgctgtacccctttttgtagaagatcaagaactgccttgaactgttgatccagtgtctttattgtactccttcaaattaattttttttaaattaatttaaaattgaatacttttaaaattaaaatatttaatttagtaaataaaattaaatattaataaagagggtaacattctgtgcccctaccaccaaaacatttaaataagcaacacacacacacacacatccctacacacacacacacagaattaggtccataattcctcttctgaaactcagggatagctatatttcaaaattcaaaatttttgatgaattttaaaatgtaacagcctgtaaactatacattatttaatatttctgccatggcctgggttagcatctgaaaataaaacacattaacatctttatggcagaaatatgaattcaccctcaagaaaaataaataacaacacaaaggcctcatcaattcagagtaggttttgccaccaaatgagtttttcacaaacctatgaaaagttggttttcataacttgcttgaattttggaattgtaaatgagggatggtgggcttatataacaaaatccatttggagcttcattcattctgcctttttgaatgcaattgaaactggatttggaacattatttgatcttgtatacaaaaatgcagttaccgaataaagtatgctttgtgtctatcatttaagtattagtctatttctgaaatctctattgctataaaagtgtaaattaatctgtttttatcttgtcagtagattatattagctggaaggataaaacttagcaaaaaattatttaaaataattgtatataaaaatcttattaagtgaaacagattaaaaaggtctttttcattgcaattatttagaaataagacaaatgtatcaattgacagagattatattttgacctgcttattgtttcagtgtttaatacttaagagaatttttacagtgaatctatgttttgcagcgtaagttttaattcagatacgtgagaaccatagatcaggaaacaatgccattaaaaatatcatttgttactcacagttcgcaaatggaggcacctgccaagccacaggtggccaaacaaggaagtaccagggtcagtcaggaggcagaaggaatgaggaggatatgtgggcaagagcctttgggggttttgcaataaagaataggagggcaggataaccggcttagcattggttcatttgaaagacttcagtgaggtctggggtgtccttcattgtctggtacctggctttgggtgacagggtgggtagattagtggctcagagtatgagagactactaaaggaggtagtggggactgactctggattagctggtttgcatatgaaagacactctcactggcaggctagtcatttgctgtctctaggaattacctagccctgggaagggcagtctctccagtgtcagtgagatgtcaaagtatcaaatacagaaactggaaacagtggttattaccatctacaaatgcacaaagtcatacaaatttaaaccaatcaaagaaattatttccttattagctttatcgtagttctttcctattttaatagcaaatatattcaattgctacttttttgcccatttttatttagtttaaaagctgaattgtgctcaaggtgtgatgatgtatgacatagtgcacgctcaaggaatgttaaacttacccccttcaccacacttcctctcccttttccttgttttcattcatttattgaatatttactaagaacccactatgtacaatgctagataccagggatgcatctcttagtcatcatggagtgaatagcgactacagatgttcaataaataactacaagcagaattatttggcaccctaggatgccaggagaaagtattgtaaagaggtatcatgccctcattagtctgaattcaagtgcatgtcatgtaaataatttttaatataatttaagacagttgagttatttacttttatgcattttgcaaaatttaaacttgaaatcttctgatgttggcaagaagtagaaattttcttttaaaagtcttatgtaacatattaaaaatatatggggccgggtgcagtggctcatgcttgtaatcacagcactttgggaggccgaggcaggaggattgcttgaggccaggagttcaagaccagcctgggcaacatagtgggaccctgcctctacaaaaaactaaaaaattagctaggcacagtggcttgtgcctgtggtcccacctactcaggaggctgaggtgggaggatcactggagcctaggaagttgaggctacagtgagctgtgattttgtcactggactccagcctggacaacagtgagaccctgtttggaaaaacaaatatatatgtatatatgtattacatgaagaaatgtatcaataagacatagagtagatatctaaattatgagttttcattatgcccttaagactgttccattctgttgtattatttattgggagttgcctcctatatttgttaggtacaaagacgctggcaactcaaggcaataaaaaaccatcaagtatgagagtagcttgatgattttgtatttttctgggtagtttgttcttaagttttcatttaataaaacattaattaataaaacattaattagtacttttgaacatatttaactttttctgggatgtgctaattttaaaacctcatactgagttagataatacaaggctatgagcaaaacagtgtgaatcctctgctgctatgaatgcaaggttaacaaatagctgctcttcaggcacaaaacagggacacctttttgattctgtggttaccaaggtcacagctatcttcagccttgtgcctgctggcaaaggaaggcttcctggtccttgacttcagccttcacattcttgctagtgtaatagcacacggccaaggatgagacacaaataacagcacagcctctagggccttccctctccatccttcctcccgctttgcctttcttttcttctttagtataatgtgctaataccatgctatctctgttctagagtggcaaaaataattatttttataaatatcataatatcctacatctacaagagagttcaaaagggtatctaacctatctttttatttatgcttatgattaataaaattttacacagctgtatgtggttcaaaaaagtgatttatgtgataaggtttttgcaataataaaaatgtttgttctctatgaattatcaatttatcatgagaatctccataaacttgtcataaatgctttccaaataaaactgtcataatactatgaaacattatctcagctacattagggactatcttttaaccaatctattttcattcttcttttgtagataacctgtctgttttcttttttaataactcagtttctgaatagacacccaaagcactttgttctttgatatcatgttttctattaaatgacttgttgcacattaacagtaaaatttaataaaaacaggttttttttgtaatattagtgccttatctgagatattttggcatataataatatatcttacaaatatgacaacattttcaataaagatgcatttccctgattaccagagattcctgacaaaactgagatggaaggagcaacctcagtgtttttagtttaattttttaatgacctttccgttcagtttcttactaaaggagttgtatatgttagatcctttgcactatagcctagatgccttctcaggactcaggaaaatgaaggtctgttttgttgctatcaattttaaattctggcaacaacgttgaactctaaatcaggttggaatctttcttaagttttcttgagattaaagagctaatgctgtttaaaatccacttaaagtatgcctttactgatgtctggctgttaggatcagttatgctggggttgaagcttccagggaacccctctgcccacctaactgaactctactcccatctttacattaaaagccatctgtgtaggctcagtgtttcctgaagtgtgagctatgaaccacctacctcataatccactgcaatatttattagagatgcttgtttggtggctgtaatcaatagtgtcctgcccccaaaattcacatccacctagaacctcagaatgtatccttatttgtaaatagggtctttgcacatataattagttaaggttatactgaactaggacaggctcaaattcaatgactgatgtctttataagaagaagaagagaggacacagacacacagggaggaaggcaatgaaaaatagaggcagacattggagtgatgcagttaccagccaaagaatgccaaggattgccactaatcaacagaagccaaaagagtgaaggaagcatttttttccttagagcattgagagggagcatggtcctgccaacaccttgatttcagacttccagcttccagaactgtgagaataaatttgtgttgttttaagccactttgtttgaggtagtctgttacagcagtcctaggaagctaacagagtggacttaagccttctagctgtttccaatgttcccctaagtgctcactacagtggggccatcataaaagcaaggaagccattcttacaggccattatcctgggatagagtctttccccatgctatgggcctaatgcccacagaagctgttcttgctacagttactaacaatggcaatggggtcaagtccaagagtctcttctgagttcctctcttacttgagctttctgctgtgcttatcactgttgataatttcatctaaacccttggttctgattccacactcaccatgctcccctcatagccttgatcctctggctctgtcactctaccgttgttgcatcctccttctctgcctgtccttcaatgtggggatcttccatgtccagcagaggccctctccacgtctcttacaaactcacccaagaaaatttattcctgcaccttagggggtggagccaagatggccaaataggaacagctctagtctacagctcccagtgtgagcgacacagaagacgggtgatttctgcatttccaactgaggtaccaggttcatctcacacgggagtgccggacagcagatgcaggactgggtgcaatgcaccgtgcgtgagctgaagaagggcgacgcatcgcctcacccaggaagcgcaaggggtcagggaactccctttcctagtcaaagaaaggggtgacagacggcacctggaaaatcgggtcactacaaccctaatactgtgcttttccaacaggcttatcaaacggcacactaggatattatatcccacacctggcttggagggtcctatgcccatggagcctcgctcattgctggcacagcagtctgagatcaaactgcaaggtggcagcgaggctgggggagaggcgcccgccattgctcaggcttgagtacataaacaaagcagcccggaagctcgaactgggtggagcccaccacagctcaaggaggcctgactgcctctgtagactccacctctgggggcagggcacagacaaataaaagacagcaataacctctgcagacttaaatgtccctgtctgacagctttgaagagagtagtgattctcccagcacacagcttgagatctgagtatgggcagactgcctcctcaagtgggtccctgacccccgagtagcctaactgggaggcgcccccaagtaggggcggactgacacctcacatggccgggtactcctctgagacaaaacttccagaggaatgatcaggcagcagcattagcagttcaccaatatccgctgttctgcagccaccgctgctgatacccaggcaaacagggtctggagtggaccgccagtaaactccaacagacctgcagctgagggtcatgactgttagaaggaaaactaacaaacaaaaaggacatccacaccaaaaccccatctgtacatcacaatcatcaaagaccaaaggtagataaaaccacaaagatggggaaaaaacagagcagaaaaaccagaaactctaaaaatcagagcgcctctcctcctccaaaggaacgcagctcctcacccgcaacagaaaaaagctggacggaaaatgactttgacaagctgagagaggaaggctacagaagatcaaactactccaagctaaaggaggaagttcgaaccaatggcaaagaagttaaaaactttgaaaaaaaaactagacgaatggataactagaataaccaatgcagagaagtccttaaaggacctgatggagctgaaaaccacggcacaagaactacgcaacgaatgcacaaacctcagtaaccgatgcgatcaactggaagaaacggtatcagcgatggaaggcaaaatgaatgaaatgaagtgtgaagagaagtttagagaaaaaagcataaaaagaaatgaacaaagcctccaagaaatatgggactatgtgaaaagaccaaatctacatctaattggtgtacctgaaagtgatggggagaatggaaccaagttggaaaacactctgcaggatattatccaggagaacttccccaatctagcaaagcaggccaacattcaaattcaggaaatacagagaatgccacaaagatactcctcaagaagagcaactccaagacacataattgtcagattcaccaaagttgaaatgaaggaaaaaatgttaagggcagccagagagaaaggtcaggttatccacaaagggaagcctatcagactaaaagctgatctctcggcagaaactctacaagtcagaagagagtgggggccaatattcaacattcttaaagaaaagagttttcaacccagaatttcatatccagccaaactaagcttcataagtgaaggagaaataaaatactttacagacaagcaaatgctgagagattttgtcaccaccaggcctgccttacaagagctcctgaaggaagcactaaacatggaaaggaacaaccggtaccagccactgcaaaaacatgccaaattgtaaagaccatcaaggctaggaagaagctgcatcaactaacgagcaaaataaccagctaacatcataatgacaggatcaaattcacacataacaatattaaccttaaatgtaaatgggctaaatgctccaattaaaaggcacagactggcaaattggataaagagtcaagacccatcagtgtgctatattcaggaaacccatctcacgtgcagagacacacataggctcaaaataaagggatggaggaagatctaccaagcaaatggaaaacaaaaaaagggaggggttgcaatcctagtctctgacaaaacagactttaaaccaacaaagatcaaaagagacaaagaaggccattacataatggtaaagggatcaattcaacaagaggaactaactatccagatatatatgcacccaatacaggagcacccagattcataaagcaagtccttagagacctacaaagtgacttagactcccacacaataataatgggagactaacaccccactatcaacattagacagatcaacgagacagaaagttaacaaggatatccaggaactgaactcagctctgcaccaagcggatctaacacacatctacagaactctccaccccaaatcaacagaatatacattcttttcagcaccataccacacatattccaaaactaaccacatagatggaagtaaagcactcctcagcaaatgtaaaagaacagaaattataacaaactgtctctcagaccacagtgcaatcaaactagaacttgggagtaagaaactcactcaaaatcgctcaactacatggaaactgaacaacctgctcctgaatgactactgcgtacataacgaaatgaaggcagaaataaagatgtgctttgaaaccaacgagaacaaagacacaacataccagaatctctgggactcattcaaagcagtgtgtagagggaaatttatagcactaaatgcccacaagagagagcaggaaagatctaaaattgacaccctaacatcacaattaaaagaactagagaagcaagagcaaacacattcaaaagccagcagaaggcaagaaataactaagatcagagcagaactgaaggaaatagagacacaaaaaaaccttcaaaaaaaatcaatgaatccaggagctggttttttgaaaagatcaacaaaattgatagaccactagcaagactaataaagaagaaaagagagaagaatcaaatagatgcaataaaaaatgacaaaggggatatcaccactgatcccacagaaatacaaactaccatcagagaatactataaacacttctatgcaaataaactagaaaatctagaagaaatggataaattcctcgacacatacactctcccaagactaaaccaggaagaagttgaatctctgaatagaccaataacaggctctgaaattgaggcaataattaatagcctaccaaccaaaaagagtccaggaccagatggattcacagccgaattctaccagaggtacaaggaggagctggtacatttcttctgaaactattccaatcaatagaaaaagagggaatcctccctaactcactttatgaggccagcatcatcctgataccaaagccgggcagagacacaacaaaaaaagagaattttagaccaatatccttgatgaacattgatgcaaaaatcctcaataaaatattggcaaaccgaatccagcagcacatcaaaaagcttatccaccatgatcaagtgggcttcatccctgggatgcaaggctggttcaacatacgcaaatcaataaacgtaatccagcatataaacagaaccaaggacaaacaccacatgattatctcaatagatgcagaaaaggcctttgacaaaattcaaagggttcttcatgctaaaaactctcaataaattaggtattgatgggacatatctcaaaataataagagctatctatgacaaatccacagccaatatcatactgaatgggcaaaaactggaagcattccctttgaaaactggcacaagacagggataccctctctcaccattcctattcaacatagtgttggaagttctggccagagcaatcaggcaggagaagggaataaagggcattcaattaggaaaagaggaagtcagattgtccctgtttgcagatgacatgattgtatatttagaaaaccccattttctcagcccaaaatctccttaagctgataagcaacttcagcaaagtctcaggatacaaaatcaatgtgcaaaaatcacaagcattcttatataccaataacagacaaaaagagagccaaatcatgagtgaactcccattcacaattgcttcaaagagaataaaatacctaggaatccaacttacaagtgttgtgaaagacctcttcaaggagaactacaaaccactgctcaatgaaataaaagaggatacaaacaaatggaagaacattccatgctcatggataggaagaatcagtattgtgaaaatggccatactgcccaaggtaatttatagattcaatgccatccccatcaagctaccaatgactttcttcacagaattggaaaaaactactttaaagttcatatggaaccaaagaagagcccacattgccaagtcaatcctaagccaaaagaacaaagctggaggcatcacactacctgacttcaaactatactacaaggctacagtaaccaaaacagcatggtactggtaccaaaacagagatacagaccaatggaacagaacagagccctcaaaaataatgccacgtatctacaactatctgatctttgacaaacctgacaaaaacaagaaatggggaaaggattccctacttaataaatggtgctgggaaaactggctagccatatggagaaagctgaaactggatcccttccttacatcttatacgaaaatttattcaagatagattaaagacttacgtgttagacctaaaaccataaaaaccctagaagaaaacctaggcaataccattcaggacataggcatgggcaaggacttcatgtctaaaacaccaaaagcaatggcaacaaaacccaaaattgacaaatgggatctaattaaactaaagagcttctgcacagcaaaagaaaccaccatcagagtgaacaggcaacctaaagaatgggagaaaatttttgcaacctactcatctgacaaagggctaatatccagaatctacaatgaactcaaacaaatttacaagaaaaaacaaacaaccccatcaaaaagtgggtgaaggatatgaacagacacttctcaaaagaagacatttatgcagccaaaagacacatgaaaaaatgctcatcatcactggccatcagagaaatgcaaatcaaaaccacaatgagataccatctcacaccagttagaatggcaatcattaaaaagtcaggaaacaacaggtgctggagaggatgtggagaaataggaacacttttacactgttggtgggactgtaaactagttcaaccagtgtggcgattcctcagggatctagaactagaaataccatttgacccagccatcccattactgggtatatacccaaaggattataaagcatgctgctataaagacacatgcacatgtatgtttattgcagcactattcacaatagcaaagacttggaaccaacccaaatgtccaacaatgatagactggattaagaaaatgtggcacatatacaccatgaaatactatgcagccataaaaaacgatgagttcgtgtcctttgtagggacatggataaagctggaaaccatcattctcagcaaactatcgcaaggacaaaaaaccaaacaccgcatgttctcactcataggtgggaattgaacaatgagaacacatggacacaggaaggggaacatcacacaccagggcctgttgtggggtagggggaggggggagggatagcattaggagatatacctaatgctaaatgatgagttaatgggtgcagcacaccaacatggcacatttatacatatgtaacaaacctgcacattgtgcacatgtaccctaaaacttaaagtataataataattaaaaaaaagaaaatttattcctgcaccttagctttgcatacctctctatgttgacaatttctgaatatttatctcaagcctagatctctcttttgggctgcaaactcatacattaaaccactgatgaataactcactctgtatgtaatattggcaagtcaacttttacatatccgacattcaactcattactttcctctccaaggctgcagttcttcctgtgttccctgctcagtgaatgatacaacagcctgcccattgctaaagccaagaacctagactcctctatcttcctcatatggttccctagactcctctatcttacatacaggggcatctcaatggtgacaagctggacaggagaactgctaccatttgtaaaaacatgcaggtgacatagcatttccactaagcaccctccagctagcaacttccatttaatccaaaacaaaggaccttaatcccccataataagggggattaaggttatccctgtatgtaagtcctcagtaaaccctacgtctcattcgctgcttctaggtcttttatttgacctctcagacatggtgccattcctactggagtcaacaggggttcagcatgacagtgggtaaattacaaaacactcatgaataagagcagtggctaagagttccacattatggtgcttctcaaagtagccaggaagttgacattcaagagaaaactattgtttcaatacaatacagatctttaatcaaaggtatccacaaaattcctctgtcaaccactggagaaaagcataatatcagatttaggtagagattaaggagataaaagcttaaaggtgaagtattcaggaagaagaaaacaattttaatgtggggaaggcatgtatattagtcaggattacccagagaaaggaaggaaagagggaaggaggggaggggaaggaaggggaggggaggggaagtatagatggagagagagagatttatgatttatatatagatttactctcatataattatggaggctgaaaagttcacagtctgccatctgtaaactggagaacaaagaaagccagaggtataatccagtccaagttcaaaggcctgagaaccagaggagccaatggtgtagatctcaatctgagcacaggataagatgagatggcatgtttcagcacagcagtgaggcaaaagaataacaggcgaatttctccttcctctgccttttgttctgttcaggccctaaaaggatgagattatactcaccaacattggggaggacaattttcctcactcagtctaccaattcaaatgctcatctcgtcccgaaacacccttgcagacacactcagaaacagtgttttaccagctatctgagcattccttagcccagtcaaattgacacataaaattaaccacacagcatgaaaacaaaagtgaaatctctcattaggggagaatgtgtggaatcttctgcatcggtgggaaaattattgatcataaatggttagatcaacttcctcttctgagccttctgaagagaatgagagaatgggagaaagtagaagagtgattgtatctggtggtcttcatcttccaagtaatgtgtgcatatatatatatatatacacacacacacacatatgtatgtatacacacacatatatacacatatactacatacttatatatgaacactaattttctcatgagtgtctagaaaccagtcatgtgattaaagcttgaattacataaacgctttaactgaaagatgagggaagaaaaaaattgtagaaaaacagaggtttcaacttatggaaaatcttaattagctacatgaactaaaaagtgaatagggaaaaacagcatgagtggaatggaacatatagaaattatattatgtaactttttacattcagaaaaagtattctattgctgtttattgaacatgaaacttcacagtccatgaataaaagtgtaccttctctggtgcaatatgaaagagccatgaggcctctcctcctgcccataataatcagtgggtacattttcattgattatttgtgcactaagagcaataaagtaagttcttagatatagcacttcaaaacacacacacaaaaaacatataaattctttaactaaacatgacaataactttctcatttacactcaatcacgttatattaggtgagcactgtcattccatcaatccattaaaggatgcagcaataataccaatgcagaatggaatagagataccaggcaggaggcctaggagagcatctgggacaactctttacattatacaaactgaatttttatcttttattttttctattttctatcacagccaaatctatactgcattttattcccttcaatgagataataataaaatccgtaggattttgaaacgtcactaacatttttaaaatgtatctgaagccccagaatccttataaataggtactttgagagagcccagggactacaagcattttggatttatttaattggctttcaggttttccttctaaataagtcagcattcaattagtcaatggcaagttttcacaatagcttaactggcaatatgaaggcatcaacttaaaactcactacaagttacagctatctgcttttccgaattgttatttatcatcctacctaccataggttcttttcagtcacacttccttccacatttactaacttaatgagctcaagaaaataaaaaagaaatgaagtttcaaaaatcccctctgacatttctttgagattctgaactacatttcatagagccgggactctgagtaatctaaaataagagctggcaacagaagcttgccagctgttgcacatttaccagcccagttacatttttcctccctctgagctgcatagttataaagggccagtatgaaccttatttggattaaaatttgtaccattcacacaacacagtttcttttaaaagtttgcatgttcattttctttattcagtatttatgctgaaactaggtatctatgatgtcctgtcatatttttgtaactataaaatgctaccatgtaaccctgcagaaagaaagtttgacctatttgattatcagaatgagacaaaatttaatctttgtggcaaaaaaaaaaatcctataaagcagcagctaatggcacatttgtacttttccatttttatgtcaagcttcattaaaaaaaaaattgtaaaatattgtaggggtgtaatggggtccctgagaccatcccttgcttggagattccctaaaatgatccatgggagccaacatgtagttgtatagttgtactcacagctaagacttattaagggcagtgtagtgaggatatacggcacagcataagggaaccagcacaggcaagtccagaggaatccacgtgcaggctccctacactcaccccttcccatgagaggtcacactgagcatcctcttccacagcaaacaaacgcagcacctgtgtgatgtttctgtccagaggcccactagagactctgtacctgtaacagtcctttctcacactgctatgaagaaaatacccaagactgggtaatttacaaaggaaagaggtttaattaactcacggttccacatggctgggaaggcctcaggaaactcagaatcacggtggaaggcaaggggaggcagacgtcttcctcacaaggtggcaaggcagagaactgcccagcgaagtagggaagagccccttataaaatcaacaggtctcgtgagaactcactcgatatcacaagagcagcatgggagaaacttcccccatgattcaatgaagtccacctggtctctcctttgacacgtggggattatggggattacaattgaagatgagctttaggtggggacacaaagcttaaccatatcagtacccaaggtttttattcggagcttgtcatgtagacagcccctgcttaccatgtaccaaacttccagaccaccagaaggaaagcaggtgtttggcatacaccacgctgtgtttcagtctaggcacagcaaaccaactttatcactaagagaattggtgagaacacctccaaattcaaattctcagacatcagccgccttgcaagtaggctttttggagaattgaagtctcagacctgctaacttaacgcctttcttcccaaaaggacatttgcagtttcttctagtttataacacgcatcatttaaatttagagagtaagaaaaaatatttctaaataggtacttttttctaaattgatatttaaacagttaaaacatttgatgataatctggatgatatacatttcaccttcaaatgtaaaaagaggaaattctaccacagagggactgttttctcattgaaaaagatccttcgagaaaagtatttgcttttgcagataactgaagaaattaggcagcattttccaaattttcttctagaatgctgtaagttgaggccattccccatcactcaccataagactgggtaatttataaatggaatgtctcatttttagaggcatccatagactcaaatttaaaaacagagactgaaaaactctacttttctattgtgttttgcacttaattgctttaagcaatgccaaaaatcagcaaaaagctgctatgatcattgccttgacattttcttataggtcacaaaatatttaaacattttctttgttattccaaaggtgattagcaagtgaaagtatttaggtttaataatgtatttaaaataatgagacatgtgaacctgaatatatacagtgatcttgatgtctctgcctatgttattaacatagaccaggagattttttgttataatttagggccttataaatgaagaagcagccacagtgtagaatctcaagagtgtcagaataatgtactagtacttttcaaagcgcttgtcaacaagtgaccttagatattaattttacccagcattattttccctattttgataatttgaaaactagatttgttatcccaagggacagcacatggaccagggatccaaccttcatggtataaacagacataggtccccggaaataggatgctactatgtgaaaaataaatgggtaaaccataaaagagtaagcatttaccaaaaaaagactgtgttaaacccaagtaagattattttaaactagaagaaactaagataatgcaaattaacaagcttgcctgtctcactttctccactccacactcagcccaccactaaccagatgaacagagcttgagggcaacattatctcaattacagaagattagaaattacaattatttttgtatatctgacttttagcatgtgtatttgaccctataggaccatcattaaataaatgaatctatactattatatggcattacccatgtaagaggtgaattgtaaacccttgcattctagaggctgtactcatgtgacttttgatttaggatcattctgcaaggttaaaaatatgtttggggtatttctcccaagtggcagttgtagcttcttgggaggagaaatgaacaactccaagatcttctcccaggaccactgatgtagcccatgtattaagtcagcccatctaaagcataacatccaaatttaagacaatccatccagttagttctcttgttgtggtagcactcaacatgtaattttatgtatacaaataatttcctcaatgctatgtagcagtgtctagcacataggaaaagcttaataaatatttagggaaagaaagaaggaaatgagaaagagagacaggggaatgaggaggagaggagaaggtgatgcaggaggaggagaaaaggaaaaagaagaggagagaaggtcagccagaagaacaaaacttaaaaaaaaaaatccatcctggctttcaacttcatgtccccaccatgaccatcatcacaactttcaccttactctttttattccacatatactagccaatttgagtgacttgctccagttaggtggtatcactctgagttcaatcgggagaaagaaatcacatagtaatttgagcaggtaacatttcacatgaataattattaactataagaggagattagagtcttcattgactagtaagaagtaaagaaagctctaaagaatataggaatcataggtataaggagctgtctgtagtaggtagaatgtgttagcttcaagtaccagaaaaccctaccaacataagtgaaacaaagagggaggtatatttttcacatcacagtaaggtgagaggtaaaagccagctggctgtggttcagcagctcaatgatgctctcaagtactcaggctctttctatctttctgctttgacctctttagatttttatctttttgtctccaagagggttatcacagtcccaggcatcatttctgtgttcaggtaagaaagaaaggggaaaaggtgacttcagtcatgtcttttaatcaggaaaacaaaagcttccttagaaaatccttatacttcctcctatctcagtggtcagaattgagtcgactgaccactctatctgcaagagaggctgcgaatatgagtatctaacctgccaacctctacagtgaaaggaataaaggggtaggaatgggtgttaggttgaccagtcagtgtttatcacactatctcctacatacatcatactaattattttttagtgcctttgtctaaattgctgcttgaatatggaaagtctttttctgaatctgctcacttatctttttatttttttatttttctatttacaaaaataaagcatgcttactatatgaaaattctacccatcttcaagtcccatctcatgtcctactaaatccataaaaattataggcaattctatttctccttattcccttttctctaaattcttgaataaattataaaatttaatacataggaatatatagcattgcattatatatgaaataccatattataccatataccatatgcatataccaattgcatctgtataaattaattacattacaatatgtgtgttaggtgcccttctaattactttacacattttaggatattaaacctcacaacaaccctaagagtgtgccctatcattttctccatttttacagtcaagaaaaccaaggcacagagaggttaagtaattgcctaaggtcagttaatacgtggcagatccggagtttaacaccaggcagttcagctccagagtctgtgcttacaaacactttgcttttctgcttctttaaggagatgttgcttaacttttctgagcctctgtttctctacagcagaaatagggtgataataacttcatgtggttgtttaaagaataaacccgccgggtgcggtggctcacggctgtaatcctagcactttgggaggctgaagtgggtggatcacgaggtcaggagattgagaccatcctggctaacacggtgaaaccctgtctctactaaaaatacaaaaaattagccaggtgtggtggcacacatctgtagtcccagctactcgggaggctgaggcaggagaatagcttgaacctgggaggcagaggttgcattgagctgagatggcgcctctgcactccagcctgggtgacagagcaagactcggtctcaaaaacaaaacaaaacaaaacaaaaaagagagaaagaaagaaaaagaataaatccaataacagaaatagtccctggcacaaagcagggactcagtatgaaatttcccttccacctactttttggtggctcccctgcccagtgacagctcagcagacattaagaaacaccagccagccactcccacagactaatgttttctaggctaaaaggccccagatcctttaaaaattcttcacaagaggagtcaaaggaaagctttcttaaagattaacagacatttcagtttcatctacttcttaaatgtgttaaaggataagaatttgataaattaacctacgttctctgctccttcacatcactaccctacttcaccaacatcagtgcaatcctgactctcccccaactccccaccccttaatgtacactataccttgtgatcatcactgtattaaatgggtgacacacgttgcattgaggtgtgactaacacaactacatgcagaatctgaggcaagttcttggctttagctccaaatacgtttttgaaactcatagcaggggtcatagttgtgaaagtcaaagattctaattcacaagatccatcaaaatgtcagctttaaaaatgtaaatgttaatcctattatttgccaaatagagaaacaggtgacagactccaaaggccttgctttgaaaaccaaaattgtctctcccagccacagtgaattaaaattgaatctctgagaattagcaccacccatttcaccaataagaaaagccatgtggccaagcacggtggctcacgcctgtaatcccagcactttgggaggccgaggcaggcggatcatgaggtcaagagattgagaccatcctagccaacacggtgaaacctcctctctactaaaaacacaaaaattagccgggcatggtggtgcacacctgtagtcccagctactcagggggctgaagcaagagaatcttttgaacccaggaaaaggaggttgcagtgagccgagattgcgccactgcactccagcctggcagcagagtgagactccgtctcaaagaaataaaaagagagaaaagaaaagccatgtatggcttaagggagattacagttgttcattctccagcatcttgatcttgacaaagctttttaaaaatgtaagtagcagtgttctaattctcatgagattttcccttggggtcaatttcccataacatcctaaataaagatttggggtcaattctttcatagaaacataaagtaggagaccatgcttagactcatggggacagaatcacagacacttgactctagaaatagcccttatctcatttatcaattccatccttgaagtgtctgtttcagtgtttctgttgacaagagactcactgctcccatatcagccaatctcttccagttgtagacagcaattatgaataaatgactcaaaattattttttaaaaagatcttggtctttctaatagaaaagacaatctttttaattcaaataattttaaattaactagcgttttgtaattaatcataattatggtgaaaaaaatagagcatagaaactcattttcttatctattttcacagaaaaaaaatagagttaaatgtccagccatttgggccaccactcccatctccatttcccatgtagcatcatcctcagaccttctgttggtcagtgccatgcccacggcaggctagaaatataatagaccgttagtaaaataatgggctaattaagtactttcccaagaatcagaccaatggaagatgtgtctatgcagtggaggtatggaccaacatttctacattccgtgatgaaagcacccacactgaatgaatgtagaatgaatgcaacgtgggctgctgaaagctacttccgcatgccagctaacctaacttgttaaaggatggtgcattgttttattttgttcattccatggatatctattgcatgtccactgtgtcatgctgtctcactctctgagaggctttaaaggtgtccaaggcaatcccagtgctcttactctttagatgacagtagtaacctaagttgttaaaggatggtccaaagtgagagaggcaaatgcacaactgccacattgtcttgaaaatcactccagcagataatacttgttgagcatcttttgtgcttaagggaataggtttaacatcttatggatgtaagcacctacaaagtacttgggaagacaaaacataaacgcagaaaaagttttatgaagacaaaactgtgtcatcaaccgaacacaagacaacatgatgaaaggggccacagcgcagtgtattattttgttcattccaggcatatctattgcatgtccactgtgtcatgctgtctcactctctgaggggctttaaaggtgtccaaggcaatcccagtgctcttactcttcaggtgacagtggtgtggtacctgtcatcagaattcagtgctgacaagggtacaactgattggctggcattattacatcaacagaactagatatgccctttatggtcaaattaagagcatagccatcatttatcaagtgccaagaattcaaaatttattatattaatttcatataacaactctggaatgtgggtattattatttctatttaataaatgcaaaaatagagatgcaagaagataaatggcttccccaagtctaggaaggagagctgaatttgaaagcagactatctgatttgtaaccttgtcaactatgtaaccgggagcaagtggcttactttctccacatctcaatttcttctgatgttaaaggcagataaaagaacatatcccactggattggtgtctggataaaatgagataccagtcgtgtttttttgttttgttttgttttgttttgtttttgtttttttttaattgagatggagcctagctctgttacccaggctggagtgcagtggcgtgatcttggctcactgcaaactccacctcccgagttcaagcaattctcttgcctcagattcctgtatagctgggattacaggtgcctgccaccatgcccagctaatttttatatttttagtagagatggggtttcactgtgttggccaggctggtctcgaactcctgacctcgtgatccgcccacctcggcctcccaaatagacatgaaattttaaagtaccatccaaatataagcattgctgtgttgtaacttttacataactataccattagatttttttttcttggctcctggctgtggaaactattagattttttaagcctgtatacagtgtgaactatttcaaatagcaatattaaaaatatctcagtaggcctggcatggtggctcacacctgtaatcccagcactttgggaggctgaggcgggcggatcagaggtcaggagtttgagacaacctggtcaacatggtgaaatcccgtctctactaaaaagacaaaaattagccaggcgtggtggcaggtgcctgtaataccagctacttgggaggctgaggcaggagaatctcttgaaatcagaaggtggaggttgcagtgagccaggagcactccactgcactcactccagcctgggcaacaagagcaaaagtctgtctcaaaaataaataaatacataaaaatactaaaaaaagaaaaaatctcagtagcaacacaacattatcctatttaaattttaatatgtacttgaactaatgctttagccgaatttacttctatagctcaaaaaaataaaaatagtgccagcttatcattatctaataggctacaaaataaaaagaattgacatgctcctggaaaaaaaataagcaaacacaattgaaaattttttgtgtctctccttgttctatctcaaagacatagcggagctaggatagatccaaaaaaggatactgaacttcagtaaacagaaatcgagtagtattatatgcaaaacacagtgctaggcattaaggaaacagataagtaaggcagaatccctgacctcaagtagttcatcactaaaaacaggcggcttccactggaagaataaatactctgctgatatgtctcactatatggtaagaataagaaaatcaggccaggtacaatgaatcctgcctgtaaccccagcactttgggaggccaaggcaggaggatcacttgaggccaggatttcaagaccagccctggcaacatagccagacagctatctctacaagaattaaaatttaaatttaaaaattagtgaggtgtggcagcatgcaagtctgtagttccagcaacacaggaggctgaggcagaaggactgcttgagcccaggagtttgaggctgcagtgagccatgatcatatcactgtactctagcctggacaacaaaaaggaaaatcagaaaatcagttttatagcttttaccctacaagatgattatattattagtctgctttctgtaatgaatccaaagtgatagaatttatttttatgttggttgtacattttgaaaaataaacaatataagaagattttaggcaactcataaataataagtgagaactgggctactaacagagactaaaacatgttagcgtatatcatttagcttttgagattgatgccacggagtttattcaggcccttctatgagtcccagttctattgtcagtacaaaacatggtcttggctgaaccaaaaagagaatggtaattcttttgattatatattaaataatcttcaatgatgacatatatttagaagtttaggtgggatatttctcaccattccaaaatcaaagaaaagtaggaaatttaaaaaaaaccctatctatattaaatagttctccacaactataccacaaaataataaggcagttgtttaagacattaagtggtcagtagtggaattgcctagtattacacctggaggtgcaggtaggttgaacaagctgggagtagtggataagggttaataatggtatattctaccaaacatgaacatgaacttgttagaaagacagtatttgcatcatcagtttggacttttaagttgccatttttttaagatgtgtattttggccagtttttgaacaggggcactgcctatggccaacaggctaagtgctatgtaactccatgggggcaccatttactcacatagactgcaatataattgtcactctttggagttgcataacatagtagtcctatgctatgtgtaagggagtggggaaggggtgaggtgggagagattattaggaaggctaggatggcttgtgaggggagggaggccaatagacacacataacccagcattcctgatctgagcacataatctggaactaaaccaggtgtctacagccccaatagggatttggaaatatatgtaggcacctggtagagtttttaaacatatactcccagatgtcatacttaccactttgtgtcattttgcaaagcattgtgttagcatcatttaaaaaatcatgtaaaacgaaaagattagatcttaacatttgaatttcttgggctcaaatgaatctgaaaatacatgccgctgaagcgtgacacagctatagaacatattcagaatgttctccaaatgcatactgcaaattctgctttacatgctgttctacttataatttgcaactaattttaagaaagtctttggctttaaagaaatctgtcatgctgctataacaccacatgattatatatgtgtatttctgaaaattctgagagttaaatcaaatatatctttcttaaacaagtaaaacactgtcatttccatcattgacaaggacatatgtctgtttagtttacctgcaaaatacacacacatacatacacacacacacatcttaaattctataaagtaatatgctattctatggtgtaaattcaagtgaagaatgctcaaccaatgacagaagtaaataatatcccatatctattatacatctctatggtttttcaataacagaaaagtgttcttttgcaactaggcactattcccacacatagtcaatatgaatggctgatggtatattaatttacaaggcatgacattcatcaatcaaaaaaaggttagtacttagtgactgaaactaagaatatatatatttacattaataattacagcaaaaattatttaattataaataactgtaggtattacttttagacattacttccactgtgcttgagactttatttgtgttttgacattgtaaaaatgatgccatagtagctcagaaagattaaataaaatttcaaaatactgtacctgggactgaaatccagattacttaaatacaaatcttttaaatctgcactgtactgtctctggaaagtgttaaaaatatttcatagccaggcacagtggttcatgcgtgtaatcctaacacttgggaaggccgagatgggcagattgcttgagcccaggagtttgaggtagacctaggcaacatggtgaaacccttccctacaaaagtacaaaaattaagccagtcatggtggcatgcaccgtggctccagctactcaggaggctgaggtgggaggatcacttaagcccaggaggtcaagactgtagtgagccatgatcacaacactgcagtccagcccgggcaacagaataagacccactctctctctctaaaaaaaaaaaaaaaaaaaaaaaaaaaacttaaaaaatagtgattatcaccagttagaatggcgattattaaaaagtcaggaaacaacagatgctggtgaggatgtggagaaataggaatgcttttacactgttggtggaagtgtaaattagttcaaccattgtggaagacagtgtggcaattcctcaaggatctagaaccagaaataccatttgacccagcaatcccattactgggtatatacccaaaggattataaatcattctactataaagacacatgcactcgtatgtttatcgcagcactattcacaatagcaaagtcttggaaccaacccaaatgctcatcaattatagactaaataaagaaaatgtgacacatatataccatggaatactatgcagtcataacaaagaatgagttcatgtcctttgcaggggcatagatgaagctgtaagccatcattctcagcaaactaacacaggaggagaaaaccaaatgccacatgttctcactcataagtggcagctgaacagtgagtacacatggacacaaggaggggaacatcacacaccagggcctgtcgggggtggcgggcaaggggagggagagcattaggataaatacctaatgtatgcggggcttaaaacctagatgacaggttgataggtgcagcaaaccaccatggcacatgtatacctatgaaacaaacctgcaggttctacgcatgtatcctagaacttaaagtaaaataaaataaaataaaataaaaaagaaagaaagagaatgactaatggcataaaatcttacaaggggaaaaaaggaaagaattcagatgacaagtggaaggattgactttgaatgggaagaagcttataccaaatatttattgctgtttaataaaccatcccgatatttagtgacttaaaaaacaacaacaacaaaagagtgagtgcaagaaataaataaaacttctttgcttgggttttgctttggtttggtttgatttcctacatttgtctagaaaatacttctcagttccatttcacctgaattttggagcccatcttagcctttattattttaaatagaattttgtgatagggagcattttagatgtaacttctcaagatgacatgttcaatgtaaatgctgttgaatgttgaagctatgctactatcaacctctgggcaaggcagacacactcaaatcatcttttagcttcccttcaatttttcttttagctttaccactgagttaatattcctttcaaagaaagttgtttaaatgatagggatcttttcattctactgtaggatcataggccagtggaaacaacaaccaaagtcagaggctatttttaatgtgcttgttatctacaagccagttccctcctcagatccctgacacaacatcacaccacacacacacacacacacacacacacacactcacttggcttctgtcatctgaaaaatgggataatgctttttaatgtttaacataaagttttaatgtttaacatagttaaagtaaattttaaaacaactgagaaaatacatatcataattataccaagtttggggtgaaggaaagacaagctgatgatatgtctttcattgtatcaacaatgaagtatttattcaacaaatattcaaggagcatattttggatgttaggctcctggaagaaaacaagaatgagatggaaagagtgagggcaatctaaaggtgaaatggaaggagactctacagcatggccttcacatatggaagatgccaaatacataagttactccaaaataaaagaataataataaatcaaacacagtctaagatacattacaaccctagttttaatttaaaattaagagtatatgcattactctttttttggtaattgatgacatgatgtaattttatattcactttgcaaagcaacaagatctaaagccttggcaagataaacattctgactaaaaaatagtgtgttttagattcttttggttgctgggatataagaggctgaggaaagagtgttcccaacacaatttgtgaccgccctttctttcctcttctccctaacaaggttagttagattcgtgcagatcctgtagattaaaaagcgcccttatcactgcctggtgatcactgttccagccctggacaatgaaggttcatccaaaagcaccacttcctttttgctattgacaggaaactctgcctgtgacaagctgcacaagcctcactcagtgcctggcggggttgcagctggagacgtgggaggaaaaacaatttctaatcctggtgtttgtgcaatagagtatcaggtggacggtgagatgggaaagctaatggggatttttttttaacattcattatttaaatacatcattgtcccagcctggatagagaactgtgatactcacaaaagaacgtacaagaaaaaataaaatatttttcaggttaagacaacttggaacttagaaatttagcatgtaaagaagtgtggtaaggttccataagagaatgataactgtgaaaatagactagctcttctaaaggatctgctaggggtatgtttcaaactctcttgaattcttatgttcaattataaaatgtgccaattcactcataaaagtgtaccagacccggcacggtggattgcgggcggggtgcggtggctcacacctgtaatcccaacactttgggaggccgtggcgggtggatcacgaggtcaggagttcgagactagcctggccaacatagtgaaatcccatctctactaaacgtacaaaaaaaaaaaaattagccaggcctggtggcaggcacctgtaatcccgcatactcagtaggctgaggcaggagaatcacttgaacccaggaggcggaggttgcagtgagccaagatagcatcactgcactccagcccaggcgacagtgcgagactccatctcaaaaaaaaaaaaaaaaaattgtaccaaactctctttaaaatattaccagagaaacagttaaaatgaaaagcactagcaattgaagcaccctgaatatcttattttcatgtatcatttttcatctatattgcttgaaagaaatacattaatcgtgggaattttgtttagatactctgattgactgtatcagaggaagacgacggaatgcacccttgatgtgcgaaaatgaggaactgatgagacaacacagatggaaatattcatcaggtagttggagatttggacctacagttctagagaaaggtgagctactaagacaggaaaaaaaaatgccaaaggagagaaaatataagaagttcaataatgaagtctcaaaaaaaagtttacttttggagtaagagaaaaaaaaaacaagtaattttactaaatgcatacctagatttttaaaaatcaaaggaatataatacacctagaagtagagaggtggatagggtctcagatgatgcaaaggtcaaaaagaaaaggaactctgagcaggaaatccaaattagcaagttggcaaagtttgacatttggagaaaataatttcagtagactaatgaaagcagaaaccagattgctagaagaactggattgcaaatgataagcaataaggcaatggaggaaatatgagtagataatactttcaaaaatgtaacgggggcaggaagagacagaagtttgatcaaggagaaagctggaagacagcttcttgctcctgaaaagggaaagtttaaacagtggaaattagacatttgcacagagaaggggaaggacaaggataagacaaaaaatctgctctttgttcttaaggaaacaaacaaacaaaaaatccgtaagaaaaaaataaaatgtaaaagaactgaaaattaagattagcactgctatttagcacactcatgtaggttagccacaccagtcagcatttaggaattccctgctgtctgaaacagccctggtttacacccatgattcaggcagtgggcctgtttgtttgcttttcctttggtgagagagtctgcgcatcctgtggcaagccaaaggtatccctgccctctcctgccctctcttccctccttgctccccttcctccccctccttttttttccctcaagctgagtttgtcttggaaattctaacctagcaaattaattttattaaaataagctaggcaaatatctctggcaatcaaggagggcttcgttctactagaagagcagccaattttttttttttttttttaaagagagaaaaggatagttacagaggaaatacagataaaacttgattattgagagcctgcctggtggtccagtttcctgggtcaacagtttggcccaaacattcaaggctggctgaagtataaaaagatacagaggcaatttgctcattcactggagagaatgcttcctagctttagaccaaagctctaagtgatattaacaaccccttactcaaaaacagaatacaaatatggtctgacaaatgtggacaataaggcactttatcagaaataacacatacacatacttggggatcttcatgtctatatgccttttcttctctagttttaagacctttcctactgaaatcttcctcaaccttaaaacccaactactacctcctccattccattttgtgaaatccacaaagtggaattcttttctaaaatgatgggaacttaacatctctatagtaagcccttggtgtcaagaattttgcactgatgttggaacttgttctctgcctctctcctcaatcccccagtcattctatgaccctataccttgcttttttttttttactttatagcatttttcattgatttatatttattcatttatttgcatattgtgtgtctcttcctgctataagatgcagaaacactgtgactttgtttcattcataaatgtattcccagaactttgttttgttgttgttgttgttgttgttgttgttgttgttgttgttttgagaccaagtctcactctgaggcacccgggctggggtacagtggtgagatctcagttcactgcaacttctgcctcccagtttcaagcgattcttccacctcagtttcccaagtagcttggattataggtgcccaccaccacacccagctaattttttttgtgtgtgtatttttagtagagatggggtttccccatattggccaggctggtctcgatctcctgacctcaggtgatctgcccacctcagcctcccaaagtgctgggattacaggtgtgagccaccacacccagcctattcccagaactttgaatagtgcccaacgcatactaggaactcagcatattttgttgacctaatcaggatatccaccttttagttttttcatttaatcctcacagcaatttgtgaagtagatattaattttcacactgtttcagataaaaatagtttttcatcaatatgaggaaataaagaataacataaaattaacatatataggtatatatgtgatatcaataattagatccctctgatgccaaagctctgttcttatgtcatttgtagcccttgtcatactgccttgtattatgtcctcatctgtcatacccacaaggatgtgagctccgtgggagcaagcctcattcttctttcaataatctccctgccatgaagatagctgctattcaccaagtgtttattgagttgaaattgaactttctcgtctcaactcttggccatacttagatttgggactcacttacatggaaaatatttgctcacaagagagtatgtagttttctacaactaatccaagataggtgacttctctcagccaagtgactgtaatacagaacaaagagacaatcgtgcacctatagaaacaagtgaacctgctggctggaaaggaatctgaacagaataacaagaggtcatttcacaagaagggaacagtaaaagcattcgtgcagagaggcaggaaggcttggaagatgcacttggagatgagggaatagacccagctgtctgggaacattgatatccattggagtggcagcagatgcaggatgcttctatagtcaccagaacaagtgagttctaaaactctgaactctcagtagtgtagtttgtgaactggtttctatatgtattagattcctattgctgttatagcaaattaccacaaatttagcagcttaaaacaacacagatttatgatcttacagttctagaggtcagatgttgatatggtttggatctgcgtccctggccaaatctcaggtggaattctaatccccagtgttggagacggggcctgctgggaggtgactggatcatgggagtggttttctcatgaatgatttagcaccatctccttggtgctgttctcataagttcacaggagatctggttgtgtaaaggcgtgtagcacctcccttctctctctgtctctcactggctcctattcctgccaagtgatgtgctgccccccactttgccttccaccatgattgtaagtttcctgaggcttcccctgaagatgagcagatgccagtaccacacttcctgttcagcctgcagaaccatgagccaaataaacctctttctttgtaaattacccagtctcaagtatttatttatagcaatatgagaacagactaatacagatgtccagaattggtcttatagcgctaaatttaagatgccagctgggttgtgtaccttttggaggttctaagggaaatcctcttcttgcctttcatggcctatagaggctgcccacattccttggcttgtagcccccttctctcttcaaaaattcatcagtacaacctctgcttctataggtcatcacctttccttccccgactgactctgtcacccccacctccctcttttatttattaaggaccactgtgattacactggatttgtctgaataatccaggatagtcacttttatccatcaaatcgactgggccacagtgcccagatatttaatcaaacattattctgtctgtttctgtgaagttgtgtcttgaaagagactagcaattaaattggtggactttgaataaggcagagtggcctccgtaatgtggataagccccatccaattagttgaacctcataatagaacaaaggctgacctctcccaaggaagaaggaattttgccaggggaatgcttttggatttgaatggcaacacttccgtaagtctccagcccactggcctgccccatcagattttggatttatcaagcctccacaaccaactgagccagtttcttaaaataaatctctctctctctctctgtcctctgtatctttctatgtatacacacacacacacacacacacacacacacacagtttgttccacttcttagagaaccctaattcacagggcaattgccccatctcaaaatctttaactaaatcacaccagcaaagttccttttgctgtgaaggtaacatactagctgattccaggaattcagacatgggtatctttaaagggccattattttgcctactacactttacaacccttatcagtccccacttgatcaagtattcatcttgaaaagcattgaacctagccctgagcaatggccatccacttgccaaaagagaagttccctgaaagatactattctgaagaatagtgatgctggacttctagcaaatgaactttaaataaaataataagtgtaattgtatacttttctttttccctaaatggaccttttctatgatacagaatgaaaaaagaaaaggccttctaatttgtgggactcaagtgatttgacaaaagctgtattggggcttcaagcatttttattttaatagtgctattcagagaggtttgcaagtataattaaatataccacatctcagttctgtatttttcacacatgatgatatctcagagacaaactatttagaaatagatctaatgacaaaaaaatgagtagtctaaggaggatgctacaatctgcatcacaaaattgcacctgttctatatcccatacaattttgcacttttattctgagcagaactatttgaatatttaaataaaacataattgagcatttggagagcaacttttgcttcaggtaatagttttaactgacaaggaatctggaagtttaccctccttcaatggtgattctaatccccccaccaacttttcaaatttctcagtggaaagtggaaaatctctgatccacaccatctgtttacctcatccagtagtgcattccactctctgcaacagaaggcttgtgacaacctgccaataaaattcctgaggttgtcaaggcacaggatacttgtgaaaaagattcagataagatttttcatggttaaattcctcacatacataccctctctctcaaagcactacttggcttcagtaagagatttcaggtaaaacagaaaaatgccacacagagagagctttcaatgatttattccataaacaggcagtttgctgtgttggaatccctgactcatccagctgtgggatataagtctgggcttccatttgcattcatttaaattgcaattagctggtggcaggtcatatccaacttagtatattccataaagaatggatttctaggtctgccagagaacactgtccatgttgaatacataataatcacccttggtgttgaacccaagcaaacagggtcacaagaaaattgtgtaaaattctctgagttctacaaccttcatgatggttgagaagttgctttctaaaacaagagacgttctgtagtaacattgagtagtaattaaagagccagacactacactaagaactttaaatatgttttcttagttaactcacgcaactactctgtgaattacattctattatccgacctacttttcagatggtgtaaccgctcaatgggttcacctttcccgctgcctagacagagctgatttatcaatgcaggggaattctgatagagaaagagtaattcatgcagagccagctgtgcgtgagaccagagttttattattactcaaatcagtctcctgagcattccaacatgagagcttttagggacaacttggtgggtggggggacgccagtgacctggagtgttgattggtcaggtcagaaatgaaatcacagggagtggaagctgtcttcttgtgttgagtcagttcctgggtgggggccacaagatcagatgagccaatctatcaatctgggtggtgccagctgatccatcaagtgcaagttctgccaaatatctcaagcactgatcttagaaacagtttagtgagggtgagaatcttgtagcctccagctgcgtgattcctaaaccatgatttctaatcttgtggctaatttgttagtcctacatagacagtctagtccccaggccagaaggggatttgccttgggaaaagcccattatcatctttttttaaaattataaactataaactaagttcctcccaaagttagttcagcctatgcccaggaatgaataaagacagcttggaggttaagagcaagatggaattagttaggtcagatctctttcactgtctcagtgacaactttgcaatgccagtttcaatggcaaagtcgaggcagaagggttaagtgattggccaagagtcacatgactggactggagacaggctataaactcagatagcttgtctaaagagtccatgtgctcaactaaagggctttgcaacatttgttccaagaaggctgtccttcctttatgaaggaaccactcttgacatatccttggatatcagtgaattttccaaggagtcatgagaatgaatttgcactgatccatccacccatactcaactagtctgaaggaacattgttacaagattggctgaatgggatagagtttttggttccaagagtaaatttattggctcacttagagatgaatctgaaacttgggctcattaacatgacgctttaatgaaataaactagtaagccatagacgttgttacaaataatctctttgattgcccaaagccatatgctgtgaaggaaataaataattacaagcagaaacattttttcctttatggtaaacaagatgaaactctctagttatattttcctattttttttttcctggagctataaaattcccaatgttgctaaatacactgtgttccccaaattcacattgtattgctttcaaatggctttaattccttcaaaatgactgatggttctatagtttgctgtgagatcagccctaaagaataggaggaagttctccaagttgccacaaatgttgatctctcctacataatacaattttcacaaaaacctcatggacagtcctctcaatagcagatcaaaacacttgattaaagataataatactgtagactgcttctctaaaaagagctgatggcttctcatagataagaaaaaacaaacaaacaaaaaggatcattggtttagtgccataaccagctctttttttcttattaaagaatggagcaacaattttccaatgcaaccattctttcagtaaacttttgccggccatcttcaaggttcacctcacatttgggaagatgtgaacaaaggtgtctacattgaagaggacagagctcctctcatggtacaaacctgtaccatttggctactcaatatagtttctgaggagacatttcaaaatcctgtgtgcactctgcttggtttgaaagcaaacttccatttccctatttcttgttattttgtttgcgtttttatacatctagccatctagcactcactggcaacctcatttttgttactgttggcttaaaaactttcattttatccaaggtttattacttcatatttgcctcctgtgtttagcctaaaaatgcctttagtttagcatgttgtctaaatctattaataattatcgaggtcaaaattttcaatctttataaaggtataaggaatacgtctacagatgaaattatgtgaagcaagactttatgctttggctttcatgaaacctgctcctccccacgcaaagaatagccaggaacttgttcctttcttccaatttgttcctatgttcacatggcaagaccagatatgggacattaaatgctttcttagccatacataaatggctttcatccttgcaaactgacagttttatagtaagactaagttccaaacaacagtggcttgttcaggccagggccagactctgtgtgccacacagattcactttggtgaagtgagagaataacctcagtcctttttttattattatggtgaaaaaatacaattttatgctccagagttagaagcctaatttccgaaaggtaaaaatagttgctaacatgaagcaacttctttgtgcatcagtttacgagttctccttcataggttctcactgtatatgggttatttctccaaagacgcagagaaaaactataaaagacaattctttattgaataaaactcttccattcacctcaaaagtgatttctcagtccctcagcctgccttttcttatcaatcccaacatcatcccaaatgcagaaaagacttgaacctgagtttttctgactgaagtttagcattgattttttggatattttatagactgtgtgccaggcatctaggcacggctagaggaataatagtgcacaggcaaacaccagtcattttcaatttgcaaatgatctcttttcctataaatagatgtatgtgaagtgtgtcacacccctaactctgtttcatgaggtgcttgtgacatttctggctcctattaccccacaaagcctttgctgtcatcatactcttattagtgaaatacaatccatgaagagcaaattcccgcaacaggaaacaatagcaaatatgatttaagattgcctgaatctggggccagccacaaagagctgctgcactgctattaaatgaaaggccaacagccaagaacaaggtcttgaagaggcagattcacaactaaatactgcaaagggctcaaatcagggaaagtgaccaactatgagcaactctcaaaaagaatacaagtggaaatggatttccagacttacttgattgcattagtaggaggctctattttctttcaagtgcctggtttggtactatatgtaatcatgagctttatttgttatttttgattattaattggggagcaaactaaaatagcaccttggaaagctaaatttaccagaaaggaaaagccaatatgtcattgtttcaaggaaaaagctgttttatcttgtgtatacagtttcttttcatctgtatttcaaatatcaaaaatagactgataaattcccaatactaaaggtaaaagcacaattatcaaatatatattcatccgttgccatctatattcttttgatggtaactgctccttccaaaaagagaacacagtaaaacataataaattttgaagtaataaaattggaaggcaataattttaaaatgctccctagaaatggcttgtcctccaggacagagtccaagtgggctctaggtggctgacatacatgctacatctgcatctaatgaaggccatactcatcttgcagtcagagaactggattattttttagattgtccactttggtatatgctatgtgatgtcttcaagagtcttctgcagagagaattatcatgcacacaccttgggtaaattaaaaacaaactccgaaaacaagccagcatttggtgtttatctaagaactctagtgtccttagggcttatctaacaaccctaataagccccatgtttggcttaaatacctgactacacattttagtagagcccaggaggcaagagttaaaatgaacgtgttaaggacaagtactcctgtttgaattagcaaaaactagttattcaacacctcaaatccgaatgtgtcattaatattattgatgagcactcagacaaaggactactagaccaggaaagcaggatttgggtggggaaagcactctgtacataggtggaattacactgatgaataaacgacagcacttcagaaagaacacacccaaatgcaaactttacatgctatatgactttgccatggatcagttctattcacagaatcatgtgaatgtcaattagtttgcaaaaataaaattccagactaaaattacttaaacaataggacatatattttcttccagaactagaaagcagtaagtagtcagttcaagagttagcaaattccatgattcagtgatgccatgaaggatctcttccctatagttccattcttccctcttcagggtgttgacaatatttcccctcacagttttaaaagggctgcagcaattccactaactcttcctgtttttactgatttaggagatgttttgtttgtttgagatggaatttcactcttgtcacccaggctggagggcaatggcacgatctcggctcactgcaacctcagcctcccaggttcaagcagttctccatcttcagcctcctgagtagctgagattacaggcggccaccactacatccagctaatttttttgtatttttagtagagacagggtttcaccatgttggtcaggctggtctggaattcctgacctcaggtgatccacccgcctcggcctcccaaaatgctgggattacaggcatgagccaccgtgcccagcctgatttaggagattttttgaatgaatgtttccccatttggtgtaggctcttaggacaagttcaagagactctaaataactgtttggttttttattttcccccagttacacgtttttgtgctagggaaagagtctaccatgtgcctcactctgtcattgttacctctcaagatttcttgggcctaggcttcaaaatggtgcaccatcgcttctgctatatttttacaagatcggcctaaatttaagaagcaggaaaatagactccacctccagattggaagaatcacaaagtcacactgccaagggtttagatgcagggaaacttagataactgagaacacagtcaattcactagcagaggaatacctttctgagacttcctcagtagatttctcttctggtccaccaggcaggattggatcacatgcctgtgctccagcagcaagaaggactcggataggcagagtctgacattttcaagttccaaagtgagaagcagactttgccagtgttgaggactagggagaaagtggctctgtggcaggcaacccatagtgtctgccaaaatgtacaatctttcacctcaatttgagagggcagttcaatagtatttagacaagaacaaaagtactgcccagtgtcaaatataattaaaattaaatatttatttaatttttacttattaaaattaaatatttatttaatttttacttattaaaattaaaattaattttattaaaattattgttatttgtaattatttataacgtatttataattatttattaaaactaaaattaaatatttattcaaaaataggaataaatattcctagctcatgatatatactttggaaggtttgtgagaagacgctggatattaagaaaaacattcagaagaaatacattaaaccattggaggctaaggaaaagaacagtgaaagttgcagtccatttgaatacatttttaacaaattgctatctatgtacttggagtagcctgatcataatatcataaaagtaacaattgatatcactatatcatttataggattttaaaaatacattacatatgccagacactttgtcaagtatattacatatgtacatatgttacatatataatatacatgatatatgccagacactttgttaagcatattacatgtgttaagtatgttatatgaccttatgaagtagatttttttatcttttaaaaataaaaagaaataaacctcatataagttagattaattgggctcagttaactcagttaataaatgacaaatatccatattcaaacctacatctatcaggttccctagtgtgaaatctttctacatatcatgctttctcttttttttttttttttttttttttgagatggagtctcactctgtcgcccaggctggagtgcagtggtgccatcccagctcactgcaagctccgcctcccaggttcatgccattctcctgcctcagcctcccgagtagctgggactacaggcgcctggccaccatgcctggctaaatttttgtatttttagtagagacagagttgcactgcagccaagatggtctcaatctcctgacctcgtgatcctcccctcttggtctgccaacgtactgggattacaggcatcagccaccgtgcccagccatcatgctttctttactaagcacatagaagaaaaagaaaaaaaaggaaaacttgggaaagcaggaagtatgacattgctgagatgatagcatggctgtgtgaataaccataaaacttgtgacaaaaacattgtttgtaacaaacactttccactcgatacatcaagaacatcttttcattgtattgaatggtaaaaaagtttgataactactatcaagttttttattctactatatgaatatatgactattttaaaatgtatttccaattataagttgaagaaagactattaaatgttcaaaatcttccttttctattgtctaagcacagaactggagtgcaggtcccagcttcccatactgtggagtggccatgcgttgtctggcccgtgaaatgtgagcagagggatctgtgtaacttacaggctcagcatgaaatatcacccatgtgacctccatatactttctcatgaaggtcagccaaagacagaggctctcttgaagaggactcctgggactccagaaatggaggagacattaaatggtaggagtttgagtctctgaataattatacgaatgcacactcatcaggaacatccattgtggaacttctgtaagcaaaaaatatacatttctgaatgttgagtcataaaatttctggattacttttttttttattatactttaagttttagggtacatgtgcacattgtgcaggttagttacatatgtatacatgtgccatgctggttttttaataaaggcaagtactattgttatttactctaaataatacatgagcaatgcttcagaggtcctctttgtagctaagtctttctgcaaatacctaattatttacttagaaaatattcttggaagtagaatttctggtcaaagggtatgaacacttaaagtttttgaaattgccttccagaaagcttctgcattatttaaaaaccctaccagcaagtcaatgaaaatttccaaaacaactcgcttcattagaatttaaccatattttctaacatagataattttgtaaggaatttgctaggctcttgtgtcagcaattttactaattatttatatgtctttaagtctatgtaacatacccatctttcaatttgtttcaaagatcaaatgtcatggaatattaacagtacatatttaaaatattaaaaaatataaggtaatacaaaaataaattagatacaaatctaatttcatgtatgtaaatgtaacagttatacatagtaacaaattttattctgccttgaaaagattatctgctaaaaccttggccatatgatctttaattagattgttactttgctgggttatcatagcagcattagttacttaacaatacagatgtttcctttttgtagtttttattggctcaagatgaacacaagctttagttcaaacaaaagtgagagagtgcaatttaaatgaggaggtgatagaatatgcactagaagagaaaaggagatagatgtgtcgactgtttgttttgttttcttttgaaaattgctgcgtctccactcctggtttgacacttggagtccagaaactttccaactgtgttgaacagaacttctgtctccccttgggagcagcagcaagccagggtagaccacaagtaccaatgaaaatacctcatcctatttatactgggtcacatttccccatttttgacagatagaacctttggagaagaatattaatgaccattgggagatgacactagtcatttagggaaacactcaataaataggcaagtgatacttcacacagggactccctagatttgcaaaatgcttataccccagaggaagcttttcctggagatgtgataatttcttttttaggataataaagcttaattctgtagaactaccagacaaagcaagacagtccactagggaggagccaagatggccgaatagaaacagctccgctctacagctcccagcgtgagcgacgcagaagacgggtgatttctgcatttccatctgaggtaccgggttcatctcactagggagtgccagacagtgggcacaggtcagtgggtgcgcgcaccgtgcgccagccgaagcagggcgaggcattgcctcactcaggaagcacaaggggtcagggagttccctttcctagtcaaagaaaggggtgacagacggcacctggaaaatcgggtcactaccacccgaataccgcacttttccgacaagcttaaaagacggcgcaccaggaggttatatcccgcacatggctcggagggtcctacgcccgtggagtctcgctgattgctagcacagcagtctgagatcaaactgcaaggaggcagcaaggctgggggaggggcgcccgccattgcccaggcttgcttaggtaaacaaagcagccgggaagctagaactgggtggagcccaccacagctcaaggaggcctgcctgcctctgtaggctccacctctgggggcagggcacagacaaacaaaaagacagcagtaacctctgcagacttaaatgtccctgtctgacagctttgaagagagcagtggttctcccagcacgcagctggagatctgagaacgggcagactgcctcctcaagtgggtccctgacccctgacccatgagcagcctaactgggaggcaccccccagcaggggcagactgacacctcacacagcccagtactccaacagacctgcaactgagggtcctgtctgttagaaggaaaactaacaaacagaaaggacatccacaccaaaaacccatctgtacatcaccatcatcaaagaccaaaagtagataaaaccacaaagatggggaaaaacagagcagaaaaactggaaactctaaaaagcagagcgcctcaccccctccaaaggaacgcagttcctcaccagcaatggaacaaagctggatggagaatgactttgacgagctgagagaagaaggcttcagacgatcaaattactctgagctacgggaggacattcaaaccaaaggcaaagaagttgaaaactttgaaaaaagttcagaagaatatataactagaatagccaatacacagaagtgcttaaaggagctgatggagctgaaaaccaaggctccagaactacgtgaagaatgcagaagcctcaggagccaatgcgatcaactggaagaaagggcatcagtgatgtaagatgaagtgaatgaaatgaagcgagaagggaagtttagagaaaaaagaataaaaagaaatgagcaaagcctccaagaaatatgggactatgtgaaaagaccaaatctacatctgattggtgtacctgaaagtgatggggagaatggaaccaagttggaaaacactctgcaggatattatccaggagaacttccccagtctagcaaggcaggccaacattcagattcaggaaatacagagaacgccacaaagatactcctcgagaagagcaactccaagacacataattgtcagattcaccaaagttgaaatgaaggaaaaaatgctaagggcagccagagagaggtcaggttacccacaaagggaagcccatcagactaacagcggatctctcggcagaaaccctacaggccagaagagagtgggggccaatattccatattcttaaagaaaagaattttcaacccagaatttcatatccagccaaactaagcttcataagtgaaggagaaataaaatactttacagacaagcaaatgctgagagattttgtcaccaccagacctgccctaaaagagctcctgaaggaagcgctaaacatggaaaggaacaaccaataccagccgctgcaaaatcatgccaaaatgtaaagaccatcaagactaggaagaaactgcatcaactaatgagcaaaataaccagctaacatcataatcacaggatcaaattcacacataacagtattaactttaaatgtaaatggactaaatgctccaattaaaagacacagactggcaaattggataaaaagtcaagacccatcagtgtgctatattcaggaaacccatctcacgtgcagagacacacatagtctcaaaataaaaggatggaggaagatctaccaagcaaatggaaaacaaaaaaaggcaggggttgcaatcctagtctctgataaaacagactttaaaccaacaaagatcaaaagagacaaagaaggccattacataatggtaaagggatcaaatcaacaagaagagctaactatcctaaataaatatgcacccaatacaggagcacccagattcataaagcaagtcctgagtgacctacaaagagacttagactcccatacattaataatgggagactttaacaccccactgtcaacattagacagatcaacaagacagaaagtcaacaaggatacccaggaattgaactcagctctgcaccaagcggacctaatagacatctacagaactctccaccccaaatcaacagaatatacatttttttcagcaccacaccacacctatttcaaaactgaccacatagttggaagtaaagttctcctcagcaaatgtaaaagaacagaaattataacaaactgtctctcagaccacagtgcaatcaaactagaactcaggattaagaaactcactcaaaaccactcaactacatggaaactgaacaacttgctcctgaatgactactgcgtacataacgaaatgaaggcagaaataaagatgttttttgaaaccaacgagaacaaagacacaacataccagaatctctgggacgcattcaaagcagtgtgtagagggaaatttatagcactaaatgcccacaagagaaagcaggaaagatccaaaattgacaccctaacatcacaattaaaaaaactagaaaagcaagagcaaacacattcaaaagctagcagaaggcaagaaataactaaaatcagagcagaactgaaggaaatagagacacaaaaaacccttcaaaaaattaatgaatccaggagctggttttttgaaaggatcagcaaaactgataaaccgctagcaagactaataaagaagaaaagagagaagaatcaaatagatgcaataaaaaatgataaaggggatatcaccaccgatcccacagaaatacaaactaccatcagagaatactacaaacacctctacgcaaataaactagaaaatctagaagaaatggataaattcctcgacatatacactctcccaagactaaaccaggaagaagttgaatctctgaatagaccaataacaggagctgaaattgtggcaataatcaatagcttaccaaccaaaaagagtccaggaccagatggattcacagccgaattctaccagaggtacaaggaggaactggtaccattccttctgaaactattccaatcaatagaaaaagagggaatcctccctaactcattttatgaggccagcatcatcctgataccaaagccaggcagagacacaacaaaaaaagagaattttagaccaatatccttgatgaacattgatggaaaaatcctcaataaaatactggcaaaccgaatccagcagcacatcaaaaagcttatccaccatgatcaagtgggcttcatccctgggatacaaggctggttcaatatacgcaaatcaatcaatgtaatccagcatataaacagaaccaaagacaaacaccacatgattatctcaatagatgcagaaaaggcctttgacaaaattcaacagcccttcatgcaaaaactctcaataaattaggtattgatgggacatatctcaaaataataagagctatctatgacaaacccacagccaatatcatactgaatgggcaaaaactggaagcattccctttgaaaactggcacaagacagggatgccctctctcaccactcctattcaacatagtgttggaagttctggccagggcaattaggcaggagaaggaaataaaaggtattcaattaggaaaagaggaagtcaaattgttcctgtttgcagatgacatgattgtgtatctagaaaaccccattgtctcagcccaaaatctccttaagctgataagcaacttcagcagtctcaggatacaaaatcaatgtacaaaaatcacaagcattcttatacaccaacaacagacagagagccaaatcatgagtgaattcccattcacagttgcttcaaagagaataaaatacctaggaatccaacttacaagggatgtgaaggacctcttcaaggagaactacaaaccactgctcaaggaaataaaagaggatacaaacaaatggaagaccattccatgctcatgggtaggaagaatcaatatcgtgaaaatggccatactgcccaaggtaatttacagattcaatgccattcccatcaagctaccaatgactttcttcacagaattggaaaaaactactttaaagttcatatggaaccaaaaaagagcccgcatcgccaagtcaatcctaagccaaaagaacaaagctggaggcatcacactacctgacctcaaactatactacaaggctacagtaaccaaaacagcatggcactggtaccaaaacagagatatagatcaatggaacagaacagagccctcagaaataatgccgcatatctacaactatctgatctttgacaaacctgagaaaaacaagcaatggggaaaggattccctatttaataaatggtgctgggaaaactggctagccatatggagaaagctgaaactggatcccttccttacaccttatacaaaaatcaattcaagatggattaaagacttaaatgttagacctaaaaccataaaaaccctagaagaaaacctaggcattaccattcaggacataggcatgggcaaggacttcatgtctaaaacaacaaaagcaatggcaacaaaacccaaaattgacaaatgggatctaattaaactaaagagcttctgcacagcaaaagaaactatcagagtgaacaggcaacctacaaaatgggagaaaattttcgcaacctactcatctgacaaagggctaatatccagaatctacaatgaactcaaacaaatttacaagaaaaaaacaaacaaccccatcaaaaagtgggtgaaggacatgaacagacacttctcaaaagaagacatttatgcacccaaaaaacacatgaaaaaatgctcaccatcactggccatcagagaaatgcaaatcaaaaccactatgagataccatctcacaccagttagaatggcaatcattaaaaagtcaggaaacaacaggtgctggagaggatgtggagaaataggaacacttttacactgttggtgggactgtaaactagttcaaccattgtggaagtccgtgtggtgattcctcagggatctagaactagaaataccatttgacccagccatcccattactgggtatatacccaaaggactataaatcatgctgctataaagacacatgcacacgtatgtttattgcggcattattcacaacagcaaagacttggaaccaacccaaatgtccaacaatgatagactggattaagaaaatgtggcacatatacaccatggaatactatgcagccataaaaaatgatgagttcacgtcctttgtagggacatggatgaaattggaaataatcattctcagtaaactatcacaagaacaaaaaaccaaacaccgcatattctcactcataggtgggaattgaacaatgagaacacatggacacaggaaggggaacatcacactctggggactgttatggggtcgggggaggggggagggatagcattgggagatacacctaatgctagatgacgagttagtgggtgcagcgcaccagcatggcacatgtatacatatgtaactaacctgcacattgtgcacatgtaccctaaaacttaaagtataacaataataaattaaaaaaaaacttacaaataatttttttctctccataaacaaaaaaaaagacagtccactaataccacattacagtctttttaaagatctcggctattttattttttctatgaattctagagtaatataacttaggcattatctggtttaaaaatacatgatctgttttcacctattataaacgaaatgagttagtatctcataaggattcttgaaagataccaagggtccagaggtcatgcgtgacatcttcaagggggccttcaaagcccctccaagtcattagcagcaaccaaagctccagaagtctcctcccagacagaggtgcaaacagcctcatggctggaagtctcatttaccactttggtgggctaaggagaaggggagaaaatgcttgcatagaaaactaactctatttcttgaaatgagtgagtcctattttatcctatttttttcctccccaaatctcatggctatcagcctaatacatgaaagtacaagactaagattattctgtctaaaataagaagataacaggccatgtatagttgtatattttattcaaaaccattatacgtatatagcattattgccaaaccgctttaaaaatgagtcacagttggccaggtgctgtggctcaggcctgaaattccagcactttgggaggcctagcggggaaggatcacctgagttcaggagttcaagaccagcctgcccaacatagtgaaaccacgtctctactaaaaatgaaaaaaaaaaaatacccaggctttgtggtgcacacatgtaatcccagccacttgggaggctgaggcaggagagtcgcttgaacccgggaggcggaggttgcagtgaccggagattgtaccactgcactccagcttgggtgacaaaaacgaaacttgattctttaaaaaaaaaaaaaaaaaagtcaaaaatgttaagggtgcaggtgtgtccactttgctgtttcagctacacacagcacacatcacacaaggttaaatgaacaattcagactttcctctgggaaattttagttattttaaagaatgtaaagactaagtatttagttcaggaggaattccgttgaagcaaattatgtaagaacaaatttttgtagcacaatttccatcacattagaactctgtagataattctagtgataccagtacattcagatctcatattttaaagacagaggcatatataaggaaatgttaactgagctttaaaatgttggaaaaatttattaatgttatgagtgaagattaaaaaaatatgtactttgtcggaatagaaattaacagggaaatattaaacgttataaatgccattaaaaagaataatcacttaaggtgacccatcaagggatgttaatagggaatgatgattggaaagtaggaaaaggaaaattgaagaataaacacaagaaaagtttcctgacagtcaaacctttttcagtctctagggagtccatggaaaatccatcaattagatcatactaagcagtactgttcagaatattaacaaagctttgtacttcttctcaactttgcactttgggaaaatatgtgtgctgctctcagtagcaagttattcaggttttggcttgttttctttataaacccctccttcatcagccgtcaataagagccaagaagacctagttaaagatgacagagaaccaaaatgtaaatgaggagtacccaactctaactcccaatataagtagttatattaatgcactcaattttctcagaaaggaaaactgatggtccacaagtgatttgtaaatattttccaaaataccaatagcaggctataatttttatgaaagaaactcaaacttcatataagtaattgttttcattctataggatatgagttagtttcaaattttcatgattaacagaggaattctcatctcccattcagatcttagggactcttagatatttacaattgaagtcagatttctttcatgattaagaaagttaaccttaaatgtgtttgagaactaaatgaagtaaactagttgttctatgttagtattatttgatgtcatcttgtttcagtatgaataagatgccaggtcacactataattaataataatattaatattgtttatcattaatggcttcatacctaaatgtctctgcttgttctatagcaacgatggtctctgtcacaaatttcatgatttttattaagacctcaaaaggctgtggcaaagatttgcttaccccggtaagactttgtgtagacattacagaagacagatgtccttaatgagtgccatttgtattcaaatagatttgaggctctactagataggccttccctggaatatcttcatgaacagctacatatccaatgtggttcggcattcatgtgtattccattctttttttttctctgtactttcttttcttaaaaataaatgttattatgtatatttaaggcatacaacatgatgttatgaattaaatatagacagtaaacaggttactgtagtgaagcaaattaatgcacccatcatgtacacatttcatttccatgacctgttactttcatggctaatataatctgagggctagaagagaaagtaagctcatcagaataatctttccacactttcttctcccttttctgtgaccattacctgtttttccaccccaaattattactctatatacattttcttgaatttttttatgcccccctcctcatggcatttaagctactctgtatttatttctacaccgagccttttccttcactactgctgtttgtagcaagtgtggagtctgcttttaactgctgactttaagtgagagtttccttccttttgattgtgttactggactcccttccaccttccctgcctgtcttatctctactgaagatgagacagcatagagattaccacctccaccacccccaaacacacgcgtgcatgcacacagacacacacacacacacagacacacacacacacacacagagcacacttccttaggcagagagaaacactgagctctttgtctttctgcttgtcatacagaaaagggaggggaggaagggagatacagaggaaggaacaggccaagttctatgactctgtctatctctgctcagggcagagaacttatatttctgaaaccaaactttacccctcctcctcccgtcacacaggatggcagagtcaccttggcaagcacatgtgtccatttgctaagatgccctgggaagagactgtatttgttcatggaaagcaggataagacgcctgaagcaaaataagtcttatctcgcttggaatcagagtgctactaggcatgatgtggaagcgcagaatagaattgtcttgtctggaaggtatattgggatgttttcatccataagagtaaaactcattagcaaaggtttaagcaaatggagaattctttttattacatagtaaaaatctgaagcagctggtaacattggttcagtagctcagtgatgtcatgactgttgtctaattcatttgtcctttttcttgaggtcacaaagcagctgacacagctgtagagcccatgtcctccttagaacagatagaacagaggacgaggaaagatcccagcagatatctgcttacttgtcattagccacaaagcctttttcagttgtaaagggggctggggaatacaagtatcttacattttcaacctctataactgaggttgaaagggaagaaaaggttgaggttaagtactgggcaagccaataaacactgtctgccacaaaaggaatcccatgcccagatttatccatttccttttctttttcttagaaatacctatgaaggacatcacacctgttgaatagcccacatttgactaggcttacaaattttagtatcactgtttactttcaaattaggaagatctttcttgatttataggaatgcaaacaattaaacaaacaaaaaacaaataaccacattaaaaaattggcaaatgacatgaacagtcacttctcaaaagaagacatacatgcagccaacaaatatacgaaaaaaaatgttcatcatcactaatcattagagaaattcaaatccaaaccacagtgagagaccatctcatgacagtcacaatgggtattactaaaaagtcaaaaaacaacagatgctggtgaggttgcagagaaaacggaacacttgtacactgctgataagaatgtaaattagttcaaccaactgcgaaaagcagtgtgaagagttcttaaaaaaaaaaaaaaaaaaaaattaaagaagaactactatgagagccagcaattccactactgggtatatacccaaaggaaaataaattattctaccaaaaagacacatgctcgtatgttcattgtagcactattcacaacagcaaaggcaaggaatcaacaaagatgtccatcaacggcggactggataaagaaaatgtggtacacatacaccatggaatactagacagtcacaaaaagaaaaaaactgtgtcctttgcagcaacatggatagagctagaggccattatcctaagtgaatgaacaaaagaacagaaaaccaaatggcacatgttctcactgataagtgagagctaaacattgaaaacacatggacacaaagatgagaacaatagacatttgggactgcttgagaaaggaggatgggagggggctgtgggctggtaaggctacctctcaggtactatgctgactacctgagtgacaggatcatttgcataccaagccccagcaacaaacaatttacccatgtaacaaacctgcacatgtacctccagaagctaaaacaaaagtagaagaaacaaaaagaatttgagcatgctgtgttttggggcctgcagttttatctttagatggcttgttgtctttagatggcacaaccatcctgctgtgtacaactcagctattgtagaggtcacatacatgtattcagaatttaaatgctaaattgtagatagggaaactgaatgaaaaaataagccatcctgttcatccttccattatattttgttcaacatacacaatatgactgtcctaatcatatctcaggctcaatttttcctttcttttgcaatttcagatggcgcctgcaagcctgaacagttaaaccctctatttgtccttgagttttcctcttgcctaaattcttcctctagttccgactctacccacccagtctttgatttttcttacagaactctttgcttccctagttattcatctctccctctcttttagagaaagcacttcctcctctggatactgtgtaatctttatcaggaccacacaatgtgcctttatgtgtgatgatagtggacagatgtgatatttccaatggattctatcttgcttgcttatttatgtattgctcagacttcagcctttagtctgaaacaaaataagttagaacgttcattgcttctaatttataatgaggtgagttttcattcatttgaaatgatttgctaattatacaaagttcttaaaaccccttaatcaaaaaccatggaatataccagagaaggttagaaattccaaattggtcttttaaaaatgtttctaaaagcaaggatgcagtactatttaacaatagattgttttttcaaagaacaattttcataatatttatgcaaaaggaacacaagtaaatgttccacggcccatgtgtcaaaagtttccaattatatctctttatcttgaaatggcttattttatgtaacagagactattagacccagaatagtttaagacctatctgtaattaaatctcatttttgcggaagacaatagagaagccacagaagctgaataacccatccaagggttcacaatttgtgagtggcaaaccagtttcctgatttccaattcagggctgtttttaccatcacctccatctcaagggctcacccctatgacaagcagctacagataccatacccagatctggtggttcgtgtgataagaggcagaagtgtggcctttgcagggctgtatcaggaaccaagtattgggtgatgggctaagaacacaaagagggagtagaaatgagaccagaagtgtggacctgctaaacatgggacagtgggacactagcagatatattctctatattctctgagccagatctggatgagagtggcagggcaaaagttgcaggtttaaaagaaggtagaaatgaccacttccaaagacagatctcccacagtatcaaaaaagtagacaggtattgcctgggggaggcaggttagttgtagttagcacattgttttactcataattaacacattgatcaattgaccttcagatcattttagttaaaaaatgtgatggggtacagtcatggaaagaaaaacattatttctacagcacctgagctgaaaaacattttcagggcatttgtacaaacaacatagctaacatccaccgtagaagtatgctttctctgcaagaaaatcctttttaaatttagtcctctccttagcttttctacttttttattcattcatccatgtagccatcagatttaggaactacctactatatacccaacaacttaatcactgtcaatatttacaataatgagatggctgtttttttttcatgtggtagaggcttggaaaacatgaattccttctttaaaatgtttgtaaatgtttgttctactaacttgaaataagtaatgtgtttgtgttcagagcaaacaattccaatgtctcattttaggaaacaaattaatattattgaattttaaatcaacaataacaaaacactcttaaaagaattggccaggggaggtgcagtgctcattcttgtaatcccagcactttgggaggcctagacgggctgatcacctgaggtcaggagttcaagaccagcatggccaacatagtgaaaccctgtctctactaaaaatacaaaaaattatccaggcatggtggtgcacacctgtaatcccagctactcaggaggctgaggcaggagaattgcttgaacccgggagccagaggtgcagtgagccgagatcgcaacactgcactccagcctgggcaacagagtgagactcggtctcaaaaaaaaaaaaaaagaattggccatgccatgaaaaaatgggatgcatcatttatgtaaaatctattcacaaataagtagagtacttaaataaatgtcagagttaaaatggtgacttaactaatactttttgtaaacttgagagtaattcctcaccatcttgaatgaagatattttgtgtatcttgattatgtggcaagacttggttgtctttttcatctgcctgaccctaatcccactcctgatcttcagtaaaatagattaaagagaaagagactctgttagtataatatacgtgcaaatgaaggtgttaatcacattaaacatgtatctactcatgtaatagtcattctctgagtagcatcaatgcctggattactccccctgctctcctcctacgtttttggatctctcttaaaggagtagaattatattttgcaggtcctgcatatacctgcaggggaccttagggtgacgtgtaaaacagatctttctcttgtaaacattgctgccctgtagcgtaatataggattattgttatatgttactaataagtttacattctagtctaccaaatgatggggaatggggatagtatattttactacagttaacattcataattagtttacatacaaattaactgaacaaattaaattatatatgcaattacaaatatatctggtaaaaattctggttcttgtttggtcttccagtgtgctttcagcaaaaactgctaatatgcctcaagccacaagccatatgaggccaaataaaactattttttaaatacactccccagctgattctaattgcccaattcatttgtgtttctttccacaaaccatttctgcagcctatcagtaggattgcctgattgatcattcccagagatttgggcagagtgcaactaggatgcctattatccctggcaacaaataaccatgttaaaaacaaatgttctccacagcagatgcagctgtggagaacatacaaactcacagaaagaatatgggcaaataaaaaagacatttgcaaagaaaaaagatttcaaaagctaacataactcccccagtgcctggcacatttataggtacccatgaaaagaatataatcaccatgttcaaacaagaaagctaaactgaactgttcacattcaacagtgacataggcagataagaaatgtaccatcagcagggaataaataatgttacccaaaatgacacctaaagagcaaaggatctagagaggtgtcatgaaattttccaaaataaaatctcaaactaaatcaacttaattattaaacaatgtaaatttgaaatgggggtagagtgaagaggaagaattgaaaaatcaaacaaagaaaactatcagttgagctttccctatgacaatgagagtaactgtcaatcgataacaatgactatgaccgtaagtataaccatcaaaacatatttaataagaggattgaaggtggtagacatttcccatatttattcattagcattccatcacagagaaatcagctaccttttggtatatgtgctagattagttcaatcaatgattattagcatatgttttaatgtccaaaacctaagagctgttgctgtgccaaagaaatcagggtgtagacaaaagaaatgcaaggaatccagcctcaccttttaaagttttcatgagacacagcttcatgaagaaaacacttgtgtattaatacaagaagtttaactcaagagtgtgtgggtagcatatcaagcaatcaaaggtagctgagcacaggaaatggaaagaaacaacataaatgcagaaagaattcaggcattgactacacaccggcccgtgaaactggctgctcccttttctatcagatcctactcggtctgtcattggatgggcagttagtagaaccagggactagacaggagttaagcaccttatgcatccccttttctctccaccaactgcatctattatcaaaatacaaactactccccaccgcccccaaaaaagtgcacttcagttgaaagtagtactctggtggcacagagaatggtatttccaatgtctttttctcagattgtttatgtatttgcacagagtgttagctaagtccctttattattttttgcatcacagcttccctccatgtttatttctctggtttacaccagcagtgtagtgttatttctccaaacaaaggaaatgtgccaaagtataattttatagtggtctccactagcctccttctttgccccctaccatttcaggctgctcagttctagttttccccacagggaaacttagtcaaggattttgcataatagttgggaacttgtcaaggattttgcataatagttgacattttgtgtgttatgcctggcactatgctaaaggtttcttatgcattatcttatttggtcagtaaaacaactttatgagatatgtttttctattatccgcatctctaagatggggaaattaaagcttagagagattaattcactgaccaaaggtgagcagagctggatctgagctagaagaggctaactctaaaacccacactctttttttttttttttttttttgagacagagtctcactctgtcgcccaggctggaatgcagtggtgagatctcggctcactgcaacctctgcctcctgggttcaagtgatgctcctgcctcagcatcccaagtagctggtactacagtcatacacgccaccatgcctggctaatttttgtatttttagtagaagcggggtttcaccatgttgctcaggctggtctcgaacacctgaccttgtgatccactcgactctgcctcccaaagtgttgggattacaggtgtgagccactgtgcccagcctttttttttttttttttttttgagagagagtctcactctgtcacccaggctggagtgcagtgtcacgatcttcactctgcaacctccgccttctaggttcaagcgattctccttcctcaacctcctgagtagctgggattgcaggtgcacaccatcatggccggctaatttttgtatttttagtagagacggggttttgccatattggccaggctggtcttgaactcctgacctcaggtgatccatccacctaggcctcccaaagtgctgggattacaggcatgagccgccatgcccagcctaaaccccccatttgtagccacttcaatatatctgctgtcttttaagaaaatgtcaaatctgtctaaattgccttttgaaaaatgagaaacaacaacaacaacaaaaaaaaaacgagcagaaggcacattctctcatcctgactccctccccacacaacccacgtggaaaagacctttacttataattttatatgaaagtgactaatgtaccaagctcagtgcactttaagagactctttcactttttaaaaaaagaattgtgagcaaagactatattctcaacaaatactgtctttctacatcaattaagggattgcaagtttgcatatagagaaaataggtctgtactctcatttatggaatttagtctggcatttttgaggtaaccattcattaggaacaaagttttgttttacagctttattaagatagtactgatatacaataaattatacatacttaaagtataaagtttggaaatttttgacatgtttactctgtgaaaacattacctactcaaaataatagacatttctatacttcctaaagttttcctttatctttgttatatttatgtcccactccccaccccttccccaggaactactgatcggctttctgagactgcatattaggtttcatgtcacagatgtttatatgaatgacatcatgtagtatatactcttttccttctggcttctttcactcagcataaatatttaagattcatctgtgttgcagtatgtatcaatggttcacttttattgttgtatagtatttcattgtgggaatatgtcacagtttgttttatccatccaccagttgatgaatatgtgggttgtttccaggttttgacttttaaagtagagcagctgtaagttttggtctgaatatgtggtatatctaggaatagaatgactggatcatatagcaagtctatggtcaacgatttacaagctgccaagttattttccaaagtgattattgtacatttccaccaacggtgtgtgagaagtgtgtagaataaccttgcttttctcaaattatgatcaagagttagtacctggctcctcagggaaaagaaatgaaaatcctggatcatagtcccttatggaccttttgtcttcattagaaaattatgtaataaatatatcaagcaaggtctcctggaatgaaaattttatgacaccacatgaagataaaaaacatgttttgaataaattaaataattagctaattgttttggagatccttgactaagacatggaaatacctcttcagaattgctcaggtcttctgaggatgcatctgcatatgacactagggcgaggatgtgtgactcagaaattccactcactggaagtcaaggcatatttttttttttttctagctgggcttaaagccaatgtcaccataactttaatggactcagtgtagctgtgagttgtattatctcaggagtataatcataaagataagttgaaaacagcattccaggagattgccaacactctattataaagtaaataaatacagatggggcactacactgaaaatgtggcatgaagttgccatccacggcagaggtcaacatttggacctgataaatgaagccaagtcatagataagaaaaaaatatctaggaccaaaagaacaaatatttaagagtggagccctcagaaaaagaaagaatcatccataggaataaaagaaaaagaaaggtaaggagtcttctggcatagaaacggcagcatttaggatgaactgtcctcaagactatctccaatgctgttccttcttcatgactgaatcccctacacttgctgtctcatctccctagggtcagctggacctgttggacttgaggtgtcaatttggatgtttaattttgatttaaactcaattttagatacttttctcttttgagatcttcatatttaatccattattcaaactcgtgtagctaatgaaatgatgggggagaatagaagccttagttttacatatacgatcagtatgatggtgattttttttcctgtataaattctatgtaaaagaaacctggtttgaacccccccccaaattagagttacttcctaatgatttttaatgtaatctgatttttttttcgggcttctttcttgtgcttgtttttcagacatatgaaggagggtcttttcatattaaattgttttcctggcagcacctgaaccaaaggatcagacttaaaataagtctttttccaatgttatgttgaaattggatacgacatttctcacaaaacttctaagtcaaacagtgatgagaaactactgcctaaaaggtacctatttaagacagagactatatataggttttttagaagttcttgttcttctccctctgcaaagcaccacacatatccatgtttcatttataaatagatttgaaaattactttcgtgcacctgcattaaccattttctgttctgtatgatgaaatacagtccttgggaagatttttcctgggtcatggtttaaaaaaaaagagaatgctgaagactatgactaaaattcctttgttaaagcccaaagtcaatcaaatctatttccatccttagcaacatgtggttccattaaagttaatcacttttctatttcggtgtataggcattaattccctactttaaggagtttaatagttgaagaaaaaaagtacaattccagaaataagtactctcatgaacatttgcagaatatttgtcttgtccgagatgtttcagaaacaaataaatgaaatgtaggaaacaagatatgggcatgatgcactatttccttgaaagaatgcattggccatttgtcatgtggggacttaataccttttattgtattatattcttctataaaggtattcttctagacatcaagcatgagagtttccagaagccatttttttgctatgttctttagtttgtgttctctaatacaactccaagaaccataccggagaaccaaacagagtggttctggccagggctcactctttctctgtttctctctcctgtcatctctatttcaacaatatctcttagctttgcttctctttgggtgcagcattattctcttctactgcaaataagaagattcctccaggtgtccagaaagatggtcaccagtggccctaggcaaacattatttgaacaacaagatgtactcaattagattatttatttttgcctacacagtttatacaagttacagataaaatagtacaaagttgtatttgctattattttctctttctaaaaccttccctctacctttagttgtgttcattttcttatttctaatattatactatgtacttgtactgtcttttttatcttgaccaatccacagattctgtattttaccaaaaacaatttgtacatttactaagtttccactttctcctactttttattcttaacaattcaagttttttcttttcctcctacacatttggtatgaatgcttagcgttttttcccccaatatattctcttttctaacaaatgcacttaaggctaaaattttccctctgcctacagctttggccacatttcacatattgtaatgtactgttttctcattgttcacttataatatttattattcatttttatttactctttagccaacagttttctaaataagtcttttaaagtttccataaaaagatattttagttgtattttaattgttaatttttttatttaatgtattatgttaaaaatattttattattattattattatactttaagttttagggtacatgtgcacaatgtgcaggttagttacatatgtatacatgtgccatgctggtgtgctgcacccattaactcgtcatttagcattaggtatatctcctaatgctattcctcccccctccccccaccccacaacagtccccagagtgtgatgttccccttcctgtgtgtaaaaatatatatatatataaaaaaaacagtgggaacagatagcaaagacagaaaaaacatttttttaaaagaaaaatatgtgtagcatatatgacatattctttagaatttgctacaaattcaaatttcctacctggttaatttaatttggaaagtttgaaaaatacatatattctctttttcttagagatatctaatcaaacttgttcttttaaaaaaatttatagcaattcttatttttgtttactcaaataattgaattttgaaaagcatagtaatactttacattcgattgtagttgttacttgtttcttgtattctatcaatctttgcattatatatttaaaatttaagtttaatgactgtcattattttggtggattatgcttcttttttatcaataattaccctaggttaagttaaaatattccttagattatattttaactgataatattgctacactttattttgttacttttttttttttttttttgagacggagtctagctctgtcacccaggctggagtgcagtggcttgatctcggctcactgcaacctctgcctcccgggttcaagtgattctccagcctcagcctcccgggtagctgggattacaggcgcccaccgccacacctggctaatttttgtatttttagtagaggtggggtttcaccatgttggccaggctgctctcgaactcttgacctcaggtgattcgcctgcctcagcctcccaaagtgctgggattacaggcgtgagccaccgcacccagcttattttgttattcttgattgataagtattttgactctcatacatgtttactttttgacatattttctttcttagaatttcttggtcttattttattaatatgctatctcttgagtgttttcagggatattaatgatatatattttttaagtattctgttctctatcagttctatttcctcgatttgttttttctcagttgtttggtgatctcttgtatgtttgagaatctctattttgcaatgctgtggttacaggcttttattataggagtttgtgatcagttataatggaggaagggtggcctatgctaccaggccaactgcagagcagagactgttagtgacttccttttagggcttgagggcttctgctgctcctgggacctctctatctctatgtctctctgactctctggttctctctccctctctctctctctgtttttctctctctttctctctctctctctctccctgtctctctctctctctctttctctctcactctctctctctctgtttttctctctctttctctctctctctctccctgtctctctctctttctctctcactctctctctctgtttccctctctctctctctttgtctcaccaggtcccaacacatatgcttaccaacctgcatcatggaggaaaaaacactgcaaaaaaaaaaaaaaaaaaaaaaaaacagagagaaagaaaaaaaccacctcctgtttcagcaaacgcatgggaaaggaaagggacttaagtggcttataactggctccactatattaaatacagttttacaaatatgcaccttaaaaatgtcctcaatataatcggatcatgactacatttctgacatgaattcatgaatttcacaaaattcttgcattcaaaaacagattattctgaatatatatacatgtgtgctcatatatgcatatgtttgtatgcatatatatgtataggtatatatacatttacagtcatgttccacataataacattccaggcaatgacagatggcatagaagatgatggtcccataagattataatagagctagaaaattactattgcctagtaacatcatagctgtggtaacgtcatcgtgcaacacattacacacgtggatgtggtgatgctggtgtaaacaaacctactgtgctgccagtcatataaaagtctagcacatacaattatataggtagtaatgcttgataatgataataaactacaatgctaccgccttatgtatttactatgctttttaatcattgttttagaatgtactccttctacttatttataaaaaaagttaactgtaaaatagcctcaggcaggtcctgtaggtccttcaagagatattccggaaggcattgttatcacaaaaaatgacaactccatgcatgttattgccctgaagaccttccaataggacaagatgtggaggaggaagacagtgatattgatgatcctgactgtgtctaggcctagcttaatgtgtatgcttgtgcctttaacaaaaagtttaaaaagtaaaaataaaattaaaacttttagaaatagtaaataagctttttagcttatagaataaggatttacagagagaaaatatttttgtacagctttacaatgtgttttttaagctaagtgttattacaaaagagtaaaatcaaattaaaaaaattttttaatttataaagtaaaaaagttacaataagctaaagttaatttattattgaagataaaaaacttttttagtataggctaactctacagagtttataaagtctacagtagtatagccctttataagtgtatcattttttatcttttataccctatttttattttaccttttctctatttagatacgtttaaggacacaaatacttactattgtgttacagttgcctacagtattcagcacagtaacatgctgtgcaggtttgtagtgtaggagcactaggctataccacgaagcctagatgtgtagtaggctataacatctaggtttgtgtaagtacattctatgatgtttgcatgacaaagtcgcctaatgatgcatttctcagaacatacccccacagtgaagcaatacatgactgtatccacactcataattaccatcttgctgtctcctgattattgttccacatgtgcgttgtgcatgttttatacaatcctccacaaaattctcagagatgctgaagtaaaactatttcttctaacaaatgaattatctatcatgagctctcattttgcatactattttaaaaatctgaatttagtccatttccattttcctccattcaattcactgattcctttttagttaagcctaattttgtatttattcatgtactcttgttttagccctaacccacactcctgggatccagagaatgggtggtactaaaagaactgccactctgcagtggtcgtagagcagggagtctttcagtctccctctgtctccatcctatgcggacatccttttaatgatgtcacttgactcgtgtggagctagatggcatgtgtgaagcatatgataccctcacagggcaattggaagtggctgggttctcttttgccacccacctggattgcagcagtgccaatcctaacccactgctgacacagtgcactcacttctctgcttactactttcccagtcccaagacctcttggccaaactgccacttctctcagatgtggattctcccattccactgtccctgtgtcatatgagcctcctaacttccaagattcaagatgagtggcaggacatgagatgactgattcgcatactcccacttaaagttagttgtatcatgtcctactcacacacacacacacacacacacacactccagactcccaatgtgagggagtggcataacacgtggtccctacaatgcttctaacttacttattttctaagctctccattcctatgaaatcattttatccagtatgaaattcacaaagagaaacttactgcttcttggccttttgctaaagagcaagtgcagaaagacacacatattctctttggcagtgggcctacatcaaatcgttatggtctcgtaccaagatgtcttttgactgaggaagctaagaatacggctccttgttctcaccagtggactcctcctcagcagcaggggctcccttccccactacccatgagggagatggtggcagttcaacaggaaaatggtaagttcacatcagttagcattttgaacaaattaatactccgtatgccatcttaccatacatttcttgtctctgcaatgaggctgagcgagactgtcccaaatgtgtttttatcctgagtctgaggcaggctgaactttaatctgcatgatgtgctgcagcttgccatcatgtcgggacagcagatccagtcccttgagtaagccagttggtcacagttcaggagaggctgagatgatctgtgatgaaatgatggatgaaatgtgaagatccccagccaatccttagagacaggggtgccatctgagtcctcccactagggccaatgacagttggcagtgacatattaaaacaattatgtctgttgcattctgtttttcattgcctaattctccactttgtactgcaaaactacattcctcaggacttgaaagagagaccacaaaatgtcacaccctagttctctaatgttcaaaactaagaaacacaaaactcaacatgtactggacttcatgtttattcactgaagatgtggaagataaattctgtcttcttaacatcaaaattcagaccaccctgcttagacctgctaatgcttacagcaatattacattatttgtgaaatgactatccagcattaacctagctttgggttgtttcaaaaacccaatttctctaaatgcatagtatgtgttgtcctaattttatttgatggaataatcatttggtaagaatagcatttctctatgctttgatgaaatatattcatccttgaggcaaagaacaagtaactatacagaaggaaaaatcaaaacccttctttgtgagaaagccattcgcaacaaagcactgcttggaaatttaaaaagaaggtccaattctgcttctaaaattattaattagaaggaagattaataccttccatagtaactggaaataattgaatcaattctgaaatatcacctgacaatttttcactgtggtgttaataatgtattattttcatgatggggaaatgacataagtttttcatgttttgtgcatatttaaaataagaatattcatgaacaaaggcagcatgccttgatggatttagaattagaagttaggatcccagagcttgtgcttcaatgaacttttaaaacatcactttgttttatttgtttgttatatttaactgcatgagaggcgtgaaattacctgagaaaaaagagggcaatgtcaaatatttcagtactggactgccatcatcttaatggtgatattggaaggatatcaaatcacatttgccttatcaagaaatttctatgtacaggaagaaaaataatagcacacaatcaacttctggcaatgacagttctcactttgatatgccatagaaggtcaccaaagccaaaataaacatcaaactttccaacaaacacctgaattatttcaaatacagcaaagcctctatgccatactaactcggtacctggcccagagaaagcactcagtaactttttgtttgaaacaataaaagaaaatgctcagtggtcaatgtattgtttcagattggtgcattgataaatgataactcagaaagtattcgttgggtaccatgtgcctaggctgaggtattacaaagacaaatcgcatctctttcttcatgaaagaggcatgtaaaaaattacaagccaatgtgttaagtacagaaatagagtcacataaaattttatgggaatataataaagacaagtattaataactctgcctaacagtcttacagaagtagccacagagtgactaatgtatgagctggttcttgaggcatgaataggatttaggtaggtggagaagagtagaagaggatatcccagaaataaggatcagaatgtacaaaggcatgacattaaaacaaaaaatcctgtttaccacacagggagaaagaagttcagtatggcaagttcaggagtgtatgtgtgaagtgtcccaagatgtggttgggaagtttaagacaagaccatcttgtgaaagcatttttaagacattctaagaattttgaatattttcctgtaggtatcaggaagttattaaagttatgtaagcagaaataccatataattgaatttgagttttataaaatttgctctgtcggcaggaagtaagaagtctcagtttagggagggaggggcagaattaggagaaaaactctcaggaaagaaattctattcataagcatggaatgttttccattcattttgtcatctctgatttttttcaataattttttctttttttctttttctttttttttcaattggagtctcactctgtcacccaggctgcagtgcagtggcacgatctcagctcactgcaacctccacctcccaggttcaagcaattctgctgcttcagcctcccgagtagctggaattacaggcatgtgccaccacatcctgctaatttttgtattttttggtagagatggagtttcaccatgttggccaggctggtttcaaactcctgacctcaggcaatctgcccgccttggcctcctaaagtgttgggattacaggtgcaagccatcgtgcctggccagtaatgttttgtaattcttattgtagagatctttaacctccctgttagctgtatttctagatattttattctttttgtgactattgtgaataggaagaatcaaaatcattaaaatgcccaaagcaatttatagattcaatgctattcctattaaactaccagtgacattgtttacagaattagaaggaaacattctaatattcatttggaaccaaaaaagagcctgaatagccaaagcaatcctaagtaaaaagaaaaaaactggaggcatcacactaccaaacttcaaactatactacagggatatagtaactaaaacagcatggtactggttcaaaaacacatagaccaatggagcaggttagataacccagaaataaagcctcacacatacaaccatctgattctcaaaaaagctgacaaaaacaagaaatgtggaaaggactccttaaatgtaaaacctaaaactataaaaaccctagaaataccattctggatattgacccaggctaagatttcatgaaaaaggctccaaaataattgcaacaaaaacaaaaattgactactgggacctaattaaactaaacagtttctgcacagcaaaataaactatcaacagagtaaatagataccctagaaaatgggagaaaatatttgtgaactatgcacctgacaaaggtctaatatcccgaatctataagaaactcaagtcaacaaccaaaaacctaacaaccccattgacaagtgggcaacgaagaacaggcacttctcaaaagacacagacacggccaacaagcgtataaaaaaatgctcaatataaccaattattagggaaatgcaaatcaaaaccacaatgagatactatctcacaccagtcagaatggctattattaaaaagtcaaaaaataacagatgctgccaagattgtggagaaaagagaatgcttatacactgctggtgggaatgtaaatacgtttagccactgtggaaagcatttggagatttctcagagaatttaaaacagaattaccattcaacccagcaatcccactactgggtatatacccagaggaaaataaattttgctaccaaaaagacacatgcacttgtacatccatcacaacactattcacaagagcaaagacattaaatcaaccaagatgcccatcaacagtggactggataaagaaaatgtgatacacacacacacacacacacacacacacacacacatatatatacacacacacacatatatatatatatacacatatatatatatatatatatacatacatactgtggaatactacgtagctataaaatacatgagatcatggtctttgcagcaatatggatggagctggaggtcattatcctatgtgaattaatatggaaacagaaaaccaaatacctcatgatctcacttataagtgggagctacacattaagtacacatggacacaaagaagggaataatagacactggggtctgtttgagggtggagggtggaaggagggtgaagattgaaaaaactaccaatcaggtattatgctgattacctgggtgacaaaactatctgtacaccaaacctctttgacatgcaatttacccatgtaacaaacttgcacatgtaacccttgaatgtaaaattaaagttggaaagaaaaaagaaagaaaggaatcctaagaacccatggagaattcaaatacaacaaagactgacaaataatcacctctctatccccaagtgcttggccctcaataattcagggcttattaaataaatgaacagatgaattaatgtctattggagttaactttgagatcaggattaaacgtggcatacgcgattttagtgaaacagataactgagattgcaatgggctaattagccgacattctgcaatacgtcctagtcatttttcagaaaaattttcaatcacattaagttacatatggactcagaatggaattaaaaattaaatctagagtagtaagccatgctgcagaccattttacattgtagtttattatactgtttttataattatgaagtattaatatatgccagataattatcagttctattttcaaataattttctctttcacaattaatgaaaatattccaatttcttagtagtcttattgttttccctgaagagttccaataagacatggttttaaaaggtactttaaagagattgttagaatatgattttgaagtttatggctcaaagataaactgatttctaaccaaatttgtgatgagtacagtgagcattggagttcccggcctaccaccttctctgccatctcttggtaacaatcaccctccgttttcttgttcacatgtcccatgaagagctcatatgcctcagggaaagctgactccaatcactggatctacaagggacgcaggcagctcaggcataaacagatctgcacaagcacattcattggccattggtagggtatatggccaaatttttagtgtatatgacttctgtgagacaggaggagatatttgtaggcactcctttgaaacaagctttctcctctggggaacaactgaagacaccatttcttccactggatggtgacacctggagcaatacagccgacttcctaccagattctccatccaactgaggatgaggcagacatctggagaaagagggggctgtgggaggttgagcccagctcaactaggatttattggccttcctataaattccagcatttccactaggtggaagtggttgacatagaaaacggctaaagatatcacaaaagtacagctaagatggagattaagagaaaggactttggaaccacacagcctgggccaactcccagttccacacccctctacctatgtgatcatagggagtcatttagatttgtgccttggtgtcatctctgcaaaatagggataataatgtttatatcacaatactatgagttagtaacaatgaatttttttaaatggattaatagcataaagtgcccagaacagtgtccagcacattgtcaatcccccaataagaggcagcctttctcaaggtccttttagtcctgaagagtctatctgtcaatcaattatttataattatgttatgtaaagcctatgatacaatatttccacttgcaaatttcagtacaaacttcatagccaggttaactcttaagatcaagaattgactgccagtagatctagaactgaacctagaacttctgaaccacttggtcaattcaccaaatattaaatccctcttatatgaaagatattggatgtatagattcatttaataacaactgcagtgagccagatagtattctaaagcttttagtttacagaagtaaacagaagacacccaatctctaccctcatgacatccttattagagtggccatctgagttccataactaagtcacatcccctcccattaaaatgttcagcagtcccatacaggaagaaatgtacaactagctgacactgtgataagtgttatcataccgtgaaacatctggtagatgggagcaataaaacaaggagaggttaaagatgtgttccaggaagatatggagtttgtcaggcatgttggtattaggtagaggggaataaatggctctcaatgaagagaagagggattgtgacaggtgtagtggcagaggtgtgaccaggatggaagactgattcagaaaacacaaggtgtcccagcacagccctgcctgtgcacaaagtcacagggactggcagagctcagatcctggaagaccacataagccatgttaaattcagacctgccatgatagatactgtggaagagatttttgtcaaataagtgttggtcccacagggtagcagaagaaacttgagaggcttgggtgtctcctcacagggagcaatggataaaggaagcatgtattaaagagtgtgaaatgtatcccaaagcaaatttccattaccgattttctgttaactgattcagatcactagaaacatctaatttattttttagacagttccaaaagataagaaaaagcaaaacactgaactaacaccagaatctgttgatgcattttgatcctgaaacaggattccatattaaagtcagctagcacgtttatgttaattttgtttaaatcaaacactacttcttatgtggctatagcaaataatgcttagagtcctaggaaattacattagcttcatatctagacattttggctggaactaaaatatcaagtgttgtttatacatgaaatcatgtaatcttagagttggaagaccttaaaggtcatgtagtacaatgttcagaccaacgcatgaggccacactctccacaatgtcctgcttcttttaaaagtctttctatttattcatccagtgaatatttgtagattaccaacaatgcacagggtgctggagatacatgatacgtgatatgttctctgtcttcatgaaacttactttaaaaaattgatagatgactagcaatttagactgctgtttctctcctaccaccgccgaccccctttccttaacatcaaaaaatacaaaccaacctactagccaaatatgtcaaaatatgtcttggaacaatgtccactggccttctgggagtagcatgaattctattcatagcctagtctattccccatgacctcagccacttctcaatgttcagcccttatctctccctgactctctctcttatgattttttaaaactcactgcacctaccagaaataataataatgattaaagggcctctactcataaattcaaatgcctagttgttttagtaatactagcttacacttacatagtactttccatgaaccaggcactttctgaagcacttgatatgtgttcactccttgaattttcataaaaacattgtgaagtaggcactcattttagtcttcattttacaaatgaatatactgaggcatgtaaaatcaaacgccatacttgtcaaaggtaagctagaattgcattgtgacactattagttaaagagtaattaagagtaatgcaatgaaatcctgtaagaatcttagtatcttatagtgtctaaataaatatgtaaataaatgcagttttgtgtaatcacaaattgtggtacactttttagatgctcgagactgatttttgttttggataaatccaggtctgcattgcccaatatggaagccactagccatacatgacatacaaatcttaattaattaaaaattaataaatttaaaattcagttcctctgtcaaattagctacattatagaatgtgcaatagccaatagccacatgtggctagtggctagagtattgggcagcacaaatactgaatgtctctatcatcacagaaagttctgttggacaacactgatctagatggtgatgaaaatggcaaaaaccctatctatgagagagaatgatgtattgaaggccagactgaagcccttgggttagctcctgccctccttgactcatgagcaaaatggattaggcaaatgctttattttcttgttcttcctccttttttatcacacaaatatcaaaaattcatcattagcaaaattgaaaatgcaaagaagtaaaatgaaaaacaagtcataaattctcctaagttaggtgatgctactttgaagtagaaatccacttctaaatagaaggtaattagtgattaatttttgtttaatttttcctctgagtctttcaatagctaataatggacctactgtgatctcacaataatctactacattttacatattaatatgcttactcaataagtaattaccaagaatttctttaaattaaaaaaagaaaactgaattaacagaaacaggtactctacccagaggggagaagcgtaacactttagtgtagactaactcatttcaactattaggaaacccagggaatcccatccttttacaaaaatattttcatactccctttaaagagcagagtgggaaaatgttgaggaaatgaggccttcctgtttctgccacatgtgtttaattatccagctgcagctccaaaataagtaagatcggaaaattctttcagatctccgtgtagctgaatatcaaaggaaatttgggtgattctaaaactattgtacttctggttcgtgttggaattatgagagttctcctgtttttgtctctaaatatagagttcagtgatttgaacctatggaatctccctgcagtcttttttcttttatatgacgactatataataagtgaagagcattttgaagagggcaagttcactttttttagttgaggccaaaggccacagtaaaatctttgttcttttacttttatttctaactatgcctaatttttttagtattctctgaaattttattaaattctttttataaatatctttctggatcttttaaaactttttttcttcaacatctaagaaaaaacatgtcacaataatattgtgatgcttgcctttgctgggcaaaatatgtttttcagacgttaatctttattacaaatatagatctgaaggagctttaggcagtcagttcagtctaacctgtttccaaacaggtctgatgaagcctgagctggtgatgccaccaaggcagattttatgatagggagaaagtgcaatatttgaagggtagaaaacagcaagaaagtgattctgtgcgctgagcttcaggactctgaccactatgcttcctcacggatgggtcacttctttttttctttttttttttttttttgagacggagtctcgctctgtcgcccaggccggagtgcagtggcgcgatctcggctcactgcaagctccgcctccagggttcacgccattcccctgcctcagcctccggagtagctgggactacaggcggccgccatcatgcccagctattttttagcagagactggctttcaccgtgttagccaggatggtctctatctcctgacctcgcgatccgcccgcctcggccttccagagtgctgggattacaggcgtgagccatcgcacccggcccggatgggtcacttctttaggaaagaaaacctctactccactgttaaatgtaagagctcagaaaccattgaaatactttttatataatgttaaggagtacaagaaagtgtaatggtagaggaacagtcaatgcaaaaagtaaaatcaatacatgccaataaaaaatgtgaaaccttctaaaggaaagaatatatacatttgcccaagaaattcttctatttagaataaacaattttaaaacatggatatgcatatttagtatgagacattaacatgtaaattatctttaaatagttttttattatattgttaaaagagtaaagaatgtgtgttggggtcctaggtgtggaaagtgatgctgagccagaattaggaagatactctgttattgagaagctgggaatttgaaaggaagtttggtatctgagagaggtgaaggagggagggggcataaacatttttccacaaacactcccagatcaggaatttgtgtgactaaggcatgatgcataactgaaatctaaaaaggtgtgactaatgcctgtgtaattttttgtggtgcatttctgttcatgaaagtaaaacaatgccttttccaagttttagtatttggaaagcttcccatagggagtatcaaaaatacatattcttccactacctttactcttccacaattaattctggcttcactcctcacctattgtgggactgtgaaccagtgacctagcttctccatgttgcttttcccacgtgtaaaattgagatattaatagtacatatgacataaagttgttataagttgttataaatgaggtaaagattaaataaaatactaattgaatctaaaacataaagttgttataaagattaagtgagatagtgcaaataaagtgcttagcacagcgcctggaacatagtgaagtctgcaataagtggaagtcattcaaactattagggtctttaaaaccacagggatatttcacaggaacaaagcagtgatctatatagtatgtcatatgaatgggaaaaatagccaatgtgacaaaagaagatacacatcagtgtctgttgaattaaggctctggttggtgataattctatacctgtggatttccgaagaccagctgaacaaacacaattcccaataaatatacttgtctgccttacgaggcagcattctgtcgaactgtgctatccaatagagctttctctgatgatggaaatattctattactctctacccagtacagtagcctcttgccacatgtcataactgagtacttggaatatggttagtataactgagggactgaacttttattttaaatttagatagccatatgtggctgtggctgccattttggacagcacagctatagaaagatacaaataaacagcatacataagtcataagtcatatatttaaaacaacttctcttttcctcactctacattatgccaaagccaaaagacaagtttaagtaccttgcatcatccttttattatggcacactagaatactcagcgtaggtatatgctgaaggggcaaagagcaaggacattccagtagcatagcacatctagaacccagatctcagtttcaaagtaccattattcactaagagtacacatgaatttttggagacgtggctgattccgagttggagatgaagaatacaaagtcaaaaaacaaaaacaaaacaaaacatgatgcagttacacaaagaaatttcaatatttgtttgcatttttgaaagatattaaaggttgtccaatcgttgcctacagcaacacttcttaaaattccatttatcccattcctttccatatctcccgcaccctgcatctgtcttaaatatcagactctcccccttttcctctcaattcccactaaattcagtctccaaacaaaatttgtatagctcctcacctctctccattcttttgctttctcctcaagtctttcttttttcccccttgaataaatctttctagtgcagataccccttccttgcttctcctttccccattctctgattttatggcacagaaagcaaggaaccaagatggcagattcaacatatctcttagaaattacaaagaccaagctaacaaattcagatttctcttatagacgtggtcagagggagaaagtatggaagtacttgtaacttaattttttctttctacttatttttgagtcctaagcacatgtattatatactattttctgagaccctttctaatgtcatctaaccaagtttctgaaagcaccacacacagttaatcctatacatgcaattatttgttgactatataatattataagtaaaattacttcctgccaaaaatatatcctcatttcagatagcaagttccctgttagaatgaggtatgtatttcctttccaagcattattatacaaaaatagaaatacacctagaggaataacacattaaacaactatcaaacgttaacattcaacatatctgtttctgccctggcaggttcctggcatcagacaatgcctggaatggaactattcctaaaagtggaagggctgatggcattgtaccatcgtaggtacaatgcacgccatggggtgtagctgggaagggtgtgtttggggtggaagcaaaaatcataaggtcacccgaatgctagttgaggggtaagacacacgaagagtaagcaagatgcccccaaaattccatttcacggtattgcctctagtcgtccttatccattcatcaaataattaaggtatgaacaatatataattaaataattttggcaaaaggtgagtttctgttattatacaaaggcttaactaataatgtgagtcttaaggtttcatactatgaaatgctagaaaacataacagacgttctcacacctttctcagtttctatcttggtgcctctattaatacacgaaaataatgtgcttcccctttacagccatgaaaatcatattgaaaatgatgcatactaaacaaaaagatactgtgtccttgaagaatcaggccataaacaagacttcttttggcattcactagaaaaatctcaaactcatgaggacctttttccaaggccatcttttaagtaacgcaaatttggaaatacatgagaggaaataatttgttaaccagctgtctttcttaaacatctcattaaacaaattaatccataccaaaggggctaccatacaaggtcataaatgaaacaagtcttgcatatttgtcactagggcaaaagatacaaaagagataaaattctgggaacaaactatgctgtttaaactctcacaaacactttctaattaaaatttggaatagaacggaaatcaacagtactcagtcatttctttacatcaactatatttagaataggacaaataatgaaagatttaataatgttcatatggaatgcattgagatcaggcagcttggagaggttggctttatagacaaaaatactctatgattccacttatatgaggtacctaaaggagtcaatttatagaaacagaaagcagaatggtggtctccagaggctgggaggaaacgtgaatggggagttgtttaatgggtatagagttcgtcttggaagatgaaaggagttctggagattggttgcacaacaatatgaatatacttaactctactgaattgtacatttaaaaatggttaagatggcaactgttctattatgtgtattttaccacaattaaatttctttaaaagagagaaaaaatacctcagttgtttcctgtaatattcagatagaattctggaggaaagatcgtctaagtcctagttatgttagatccttcaagatcctgtccctccttacgtctccctctgatgacgtctcccttcagcactgacactctgtactgctagctgtactggaaagttcctagatggcagtttttttctcaaactctgactcccagaacattttctactttttcccctgggagatgatgggggatttaccctgaagctaaggaagctaagacagcagggcacttcaccaccattctcttccaaagccatgtacttaatttttttcattttattttaaaccactccctctctccccacatacacaaaaaatttgtataagcttcagaccccactaaacttgcatccacctctgccaaggtgtcttatatatatagtaggatatcccttcctccaggacataagcatcctgtcccaaacccccttttggtgatgtgtgtattgtcacattgtttacgtattgtcacagacactggattgtacttaccagccttccaaaccaagctgtgtgtgttttctaaggaaagggattttatttgtctctctacttcagttcctgaaacatagtacaggataagtgtacaagaattgatttaagtcagttcacgaactgacttaagaaagctggcagaagagtcaggactaaaatcgagtctttaagttatgggtacgcaaaggcagacagagtggtataatggccattggagactcagaagagggagggtaagaggagggcgagggaagaaaattacatattgattaccacatacactgttcaggtggcaggtacactaaaatctcagatttcaccactatacaattcatccatgtaaccaaaaatcacttgttccccaaaagctatcaaaattttaaaactctttttaaataattaatataataataataataaaatcgagtctttagtatttcccctacccctaactcatcttttcttctttgcctagttaggggcacacaaacttccctcttagaaatatagggatttgcttgctatgcaaagtaaacattaaacaggtttaactagacagctcaagttttatgaaactaatctttatgtcaagacactgaaggcaacttaataaaaacagggatttagatatgaataaactatatacaaacttgacgtcctacttgaagaaaaagtaaaagttgggctcagtatttctgtctgcatactgtgcaaacaattcctaaaatacaaatcatacctctaaagtgaaataaggaaaagttcctcatactgaaaagctccctcagaatgcattttagatcctcaaaaacttaaggacaagttcatatgtaggtatttctgtgtgcttacacaggattaatacttttgaatcattaacaagtcaaattagtaagaataaaaataaacaatattaatgtgtacttagtatgtcaacattttgctgttttcccatgcattattttattttagcctcttgatgtctctatgaggtaagtattattattattattattcccatttcacaagctttgagagaataagtcaagtgttccaggtcacccagccagaaaggtattaagccaggactggcactcaatgcctggcctccaagccaaaccctttcaccattaagctgcattatctctctttttttgaagttatcttttccaaaggccattttcagtccaggacaaagcagtgaggccggctggggcatcagggcactccctgagctcacaaagggataatgagaatattcaaaaagatcatcctgctagagatgagtaagaaaacagggagatataaattttatgtacttaaaaaatgaatcatgcagacattgcctgagttataagcaactatttcaggctagatgaattttgtgaaataaaattttggggaccttaaattgtgtatatattatagttaagttgatccctgagttttaatttacgggtatattttatttagaatcacaattgtttttataatacaataataacaaaaccgtcactctgaataaacaggaatatatgtttatgttgtacagtaacttgttccaaggagttattaaaactgtaaaccagactttacagaaggcagaggcaaaaggaaagcatgttgctatcttatcctgcagtgcagatgaagatatcaaaatggggtattgcctgccaggtgtattgtaaactgtgattggaaaaggagacaaaataaggaatcaagatatcatgccaatgctttaaaagaaagtgcttttgttttcaatatttttaaggttaacagagtgaaaagactgaattaaaatcaatggtcagttcttacatgcttcttcaaatttcccaaaccatgtgtttgccttctctatttgctatctcagagagttttgaattagaaccactttccttcctaaatttaaagcagtaataaaatgttaaactgcagaaatgaaatgattatgtatatgtatatgtgtatgtatatgtatatgcatatgtatataacatagtttcagtagtacattactgaaaacatgaaagcctaactagataattactggtacaacacatttcttctgttgcacatgtaccgggaagaaaatcaaattcaaaaggagtggtgcaagatggtggactgagcacatttgtttatcctcttttcttctctagatcttttcaaaagtaaagatatagagaaaacatagaatcacaaaaaagaaagaactggagatggactatcagcaaataagagttttaaatgaagttacaggaggcaaaaagtagaatgaggtgggataactagtgaagttatccagaaaaaaagtcacagcccagaatgtgttcgttttcaactcttgaaagtcaacctacgtatacatcagaaaggtgttaattatgggtgtagaacagaatgcaaatgcttttaaacttgacgtgtatacgtgaaagtataagtgatgtaaattaggaaatggaaacaaggaagaaagtttaaaacaagagtttaaattagtttaaatcactattgtccttttatggactgagaagcctagagatactgtctattatcagtagatacacaaatagccaagaagtcataaagtactgctagaacagtgctataacaaagctggagggtgacggtgggggtagcaatggtgtggaggacataacactgctaaatctccatcgattacatcagaaagtcaataaattacaccaaagtgcaaaattaagaaatagtggcatagtatacatagcatgtagatttatgaagttgaggtatgaaagaagtttgagacagaaacacttagggaaaaaaaaaactgttgtctctgggaaacagaattacatgtaggagaagatggggcaaggagctaatgttattacaaatttttccatattttatttttttaaatgggcatgtattatgtttgcaaaattctaaatgcatataagaaaaaataaaagccttcaaacatctctgtaggttcagcatatcaatttacgtttgatacgcatggtggggaagtaaggcaaatgcctgaaaaatgcagaacctgcatagaaagaatgtagaagttcctatttaggactgtgttatgacatggtgatgtctgtttctattccggccaataaatcctggcagttggtcaattgttatcctgttaaaaggtctggagtggaagaatggactgtgtttttcgtaaaaagcttgctgacaagaccagagagagtttccactggcaattctatttcacagtcctttcccttctttgggcaacacaaatgatggcaatgggcaaccacatggcctctaaaatcttttccttcactcctctgagtgcaaatctctacagcacagaaatgctctggatagttctgtgcttctgtgattggtaatatcccttggacatgtttaagaactatagaagcaaaatagcttgattttccagaacacggcatcttcacgatatagcatctactaatttaagataaaacggtttcatagatccaaaaaggtagaaaagttccagtgattcatagagttaattggtcaattattgccaattagaattagtcagaaatatgcacacacacacacacacacacacacacacacacacacaggacaaaacatatctctgcatagttcaactttgttccaaaaggaaataataatcaatccctaaaacaacagaaatgtcactagcctgtcaaatcctgggtagcactcgggcctcagagagttaaattcacgccatattaggaaggcattaattattattacagaacagaatgtaataatattacattattaatataccaaataatattacaaatattattacagaaagtaataatattaaaattgatatactgaacctataatgttatataattattattacataacattctgtttattaggtaaaaatgtaaatgatataatttggaagatgcagttctcctaaatgtagctctcagattcccaaagcactggccagtaagaaggctgcagcttgcctacaagtgacacacctaaatgagacccaagtgactgagttaacaaattcttgtaactattggctctaggtgaatttatgggcaaacataggcagcctagcactggaggtgtgtaggactataccacttcaattccaaatccatctttctatgagaataattcaggataaccctccctcactctactcatgttcctctggtgagtatcatctctgcaggtgtgattggtccagaaagcctgcacactcttctgtggccgagagccagtagataggctgtatcttcttccagatatgcctggcctgccagtttcttatgggctttttattgccagcctcagtttttgctaatactaagctattaaaagctaatcgcaaattaataataacacatatctgtccattaatttagaatttatttcattcggtgttcatgccaaatcagaggcacagctcccatagacatggcacacaagcttcaccagatttacagactcccattcccatatctcgtctttaattctgccttcctgcttgtcactacagatgcgctctccatgctcccagctaaagccaatcaattcttccacttgtgctgtagacacatctacttcctcttggtcaagaatatcatttcaaggatagataccccattcttcatgatgtgattattattgcttgcctgtatcaaaacgtctcatgtaccccagaaatacatacacctacaatgtacccacaaaaatgaaaacttttaactttaaaaaaatttaaagaacattatatcagcaagtttcaccccctctcctgcagcatccatttttctctctctatccattaagatacacatgtactactatttctcccatttaaaaaaaactttaaaaccttgttcttggtcctgcttcttttttagcaaccattcttgtttttcctcatcatttatatcaaatgttctcagaaagagttgcctaaacctactccaattgtttcaaattcctctctttacattctcccctaaatccatgtcaggcttccaaaaatgtggagaacaccaatgagctccccctggctgatgcaatggtcaattctcagttctcaccttactggaaatatcagcaatatctgtcatagtccttcaatctctcctccttgatgccctttcttcacttgaattccaggcaccttggtctcctgactttcttcctacctcaccagatggcccttgccagtctcctttactgttttttcttcctctcccagacctcccaacattggagtaccccatggctcaactgttcttccgcttctttaattcttttcaatccctggtgattttacaatctctttgacttaaatactatccacatggtcaaccactctcaaacttatatgatacagacaggcctatcacctggcctgctcctatatcagagtctgtatttccttcctccttgcagttaggtggcaccatatgaatagctttggccttagtcaacgggctatgagagaaagtgattggtgtcacttctggactgatatattagaaaccaatgtgtgactctccagttcttttatctccctgctgtgtaacctgcaagccatgtgtttcagacacagttacaatatggtgatgtttccatcagctctgatgcctgagtatatgtatgaagcagagctcccaacactcatgtttgatatgtatcctcagtgagaagaaatcctgtgctatgttaagccattcacagcttgggacttttaactataacataatttaggttttcctaaaagatatctcaatcttaacatgaccaacactgagtttctgatgttccgcctcaaaacttactccacctgcagtttccctgtaggagttgatgtcagctccaccattctagttgctcaggtcaaaatatttgagcccctctgactcttcaattcttctcacatccctccagtctatcaggggatgttgttggctttgccttgcaaatatatctacaattcaagaacttcgcctgactcccaaccctagcaacccgagtctgtttgccaacatcatctctctcagatcactctagtagcctcctaactggtctccttccttccatcttgccctctatagtaaactctcaagacagtagtcaaagtcatccttttaaaactcaattaaaatcatctccttcctcctcagacctttccaagtcttcccatctccccctggaataaaagcaaatttcttatcgtggcttacaagactttacatgattaggctgtacctgagtcctcattacctctctgatttccatggctttccccttgactccattctagccacgctggcctcctcacgactctgctgacaccagataatccctagggcctttgccctggtgactcccccagcctggagtgctctttgctggtggctgatcctttacatctcttgaattttttctcaaatgccacctactcaatggagcctaccctgacaattttttttcttttcttttcttttttttttcagacggagtctcactctgttgcccaggctggagtgcagtggcgcgatctcggcccactgcacgctccgcctcccgggttcaggccattctcctgcctcagcctccccaggagctgcgactacaggcgaccgccaccgccccctgctaatttctttttgtatttttagtagagacggggttttaccgtgttagccaggatggtctcaatctcctgacctcgtgatccgcccgcctcagcctcccaaagtgctgggattacaggtgtgagccaccgtgcccggcgacaattttattttaagctgcaataagcctactcttcccaccagaagctttctgcctttaccctactgtttttccccacatcacttatttattgtgatgttcatttatttatgtttattagtgtctccttacacatctgtatcccttctgttatgaaacataactgcctggaacagtgtatgtcccataaaagagctaaataaatatttcctggatttattaaggtgggcaaggctgacatgtttttatgtgacaggtaaaaatacagactcagagagacaatggggagacttgcccaagattgtgcagttaataagtgttcaaaaaataaataaaagaagaatttccaaaatatcatagtttgtttaaatcttattgtttcatcttgatactaaataagagcctacctgatctgcatgtttttactctagattaatatgcctgaataacatgttctagaagttctattttactgtctttaacaattaaatttatgaaagaagatattgatgtaggtagaaaagtttcagacaaatctgaatagtgttatgcctcaaatacatttgcatatttattttttgcactataatataaattgcttatttttgagaaagtgacaattgtttcatgatttaactttctattcatcaaagtttccacagggatggaaataataaacaaattagtattactcatttgcgatctgtgctcataaaccgtatgtgaggatcatgcatctgttaagattctgcttttatgatgccttttttttatatccaagattaaagtaaaaagcaaatgaagattttaaatatgttggccatatgcaaaaatgtatttcaaattgctcattaaaatttttctctacccatatgaaaaaacttgatttaatctactttacagttattgcaagacaaaatgaaaaataaaaaaattttcttttgttaaattaagccaacgatagcaaacattaaaaaaaaagataacataacaaaatcaaatacttggggtctaagataataaaaacaccaaaagaatattggctttgctggcaagacatgagcatcaccctctgaaactgcagtaaaaatgacttaaatataaacaagtaccaaagtctaagaaacactcatccaggaagctaatttttatattcttgcttttgcatttctaataatgacatgaatttgatccatgagactctgaatttggagaacgaggagtcacataattgtcttccagaggttccaaagctggcattctgtaatgttcatgttcataacagctccgtgtctatacttacaattttagtcttagcatgaatttgagtcacatttatgaagttctgtctttgagccagactttgcatgacacattatgagcaaatagcaaaacatccttgcctcaaaaactcaaacttttgtgaaaacagatatagaaacaattagctgcaaagtaaagcaatgtgaggttcaaggggctttcagagcacaaaagaagagtggatcatttctgacttgagaaccagggtaaggcactagtaatgaagacacatttgagctaaaacaattgtttaattccaatcattggcatttcatcagatgcagcctaattttctatatgaatatgattaataacaagttttccattacaatcatgggactttttgcctcacacaaatgaaaacagatgtagagccaaagaaatgtgaatattttaacaaagttttttttttttaatcaagtatgtaattactggcccatgcaaaagtgggaataagatggttctcttagttgtgcagaagtgtgaaagtctcagtcatgccacagtcggggaaatgttgactcaggttattgcacagaagctgttacagtttttcactttgctaacttatgtggaatttgttttcaactcaaatccattttggatattttttaataggaaacaggtctttaataatttgggaattgtactaaagagttcatgtttttttctaaaggcaaaaagggacactaaatcttaagcagaaaagtaaatttgcttttcagaaaagtcaatctagaggcaaagtgaagggcaggttgaaaagtagaaatgtggctgactctcttttcggactcagcccacctgcacccaggtgaaacaaacagccatgttgctcacacaaagcctgtttggtggtctcttcacacggacgcgcatgaaatttagtggatcaggggacctcccttaggagatcaatcccctgtcctcctgctctttgctccgtgagaaagatccacctatgacctcaggtcctcagaccgacctgcccaagaaacatctcaccaatttcaaatctggtaagcagcctctttttactctcttctccaacttccctcactatccctcaacctctttctcctttcaatcttggtgccacacttcaatttctcccttctcttaatttcaattcctttcattttccggtagagacaaaggagacaggttttatctgtggacccaaaactccggcgccggtcacggactgggaaggcagccttcccttggtgtttaatcaatgcagggcgcctctctgattattcacccacgtttcaaaggtgtcagaccacgcagggatgcctgccttggtcctccacccttagcggcaagtcccgcttttctgggggaggggcaagtacccctcaaccccttctccttcacccttagcggcaagtcccacttttctagggggcaagaacacccaatcccttatttccacaccccaacctcttatctctgtgccccaatcccttatttccgtgccccaaccccccttcctgcttttctggagggtaagaacccccaaaacccttccctccgtgtctctacactctcttttctgtgggtttgcctccttcactatgggcaaccttccaccctccattcctccttcttctcccttagcctgtgttctcaagaacttaaaacctcttcaactcacacctgacctaaaacgtaaatgccttattttcttctgcaatgccgcttgaccccaatacaaactcgacagcactttcaatttttccatcctacaagatctaaataattcttgtcgtaaaatgggcaaatggtctgaggtgcctgacatccaggcattcttttacacatcagtcccttcctagtctctgtgcccagtgcaactcgtcccaaatcttccttctttccctcccgcctgtcccctcagtcccaaccccaagcgtcgctgagtctttctaatcttccttttctacagacccatctgacctctcccctcctcgccaggccgagctaggtcccaatgcttcctcagcctctgctcctccaccctataatctttttatcgcctcccctcctcacacctggtccggcttacagtttccttccgtgactagccctcccccacctgcccagcaatttattcttaaaaaggtggctggagctaaatgcatagtcaaggttaatgctcctttttctttatcccaaatcagatagcatttaggctgtttttcatcaaatataaaaatccagcccagttcatggctcatttggcagcaaccctgagacgctttacagccctagaccctaaaaggtcaaaaggccatcttattctcaatatacattttattacccaatctgctccagatattaaataaaactccaaaaattagaatctggccctcaaaccccacaacagggcttaattaacctcaacttcaaggtgtacaataatagaaaaaagttgcaattccttgcctccactgtgagacaaaccccagccacatctccagcacacaagaacttccaaacacctgaactgcagcagccaggcgttcctccagaacctcctcccccaggagcttgctacacgtgccggaaatctggccactgggccaaggaatgcccgcagcccaggattcctcctaagccgcgtcccatctgtgtgagaccccactgaaaatcgaactgttcaactcacctggcagccactcccagagcccctggaactctggcccaaggctctctgactgactccttcccagatcttcttggcttagtggctgaagactgacactgcccaatcgcctcggaagccccctaacccatcacggacgccgagctttaggtaactctcacagtggaaagtaagcccgtccccttctaaatcaataccccttctaaatcaatacggaggctacccactccatattaccttcttttcaatggcctgtttcccttgcctccataactgttgtgggtattgacggccaggcttctaaacctcttaaaactccccaactctggtgccaacttagacaatactcttttaagcactcctttttagttatccccacctgcccagttcccttattaggctgagacactttaactaaattatctgcttccctgactattcctggactatagctatatctcattgctgcccttctccccaatccaaagcctcctttgcgtcctcctcttgtatccccccaccttaacacacaagtataagatacctctactccctccttggcgaccgatcatgcaccccttaccatctcattaaaacctaatcacccttaccctgctcaatgtcaagatcccatcccacagcaggctttaaaaggattaaagcctgttatcactcgcctgctatagcatggccttttaaagcctataaactctccttaccattcccccatttcacctgtcctaaaaccagacaaggcttacaagttagttcagaatctgcgccttatcaaccaaattgttttgcctatccaccccatggtgccaaacccatatactctcccatcctcaatacctccctctactacccattattctgttctggatctcaaatatgctttttttttactattcctttgcacccttcatcccagcctctctttgctttcacttagactgaccctgacacccattaggctcagcaaattacctcggctgtactgctgcaaggcttcacagacagcccccattacttcagtcaagccaaaatttcatcctcatctgttacctatctcagcataattctcataaaaacacacgtgctctccctgctgatcatgtccgattaatctcccaaacctcaatcccttacagaacaacaactcctttccttcctaggcatggttagtgcggtcagaattcttacacaagagccaggaccgcaccctgtagcctttctgtccaaacaacttgaccttactgttttagcctagccctcatgtctgcgtgcagtggctgcagctgctttagtatttttagaggccctaaaaatcacaaaactatgctcaactcactctctacatttctcataacttccaaaatctattttcttcctcatacctgatgcatatactttctgctccccggctccttcagctgtactcactctttgttaagtcccaaaattaccattgttcctggcccggacttcaatctggcctcccgcattattcctgataccacatctgacctccatgactgtatctctctgatccacctgacattcaccccatttccccatatttccttctttcctgttcctcaccctgatcacccttgatttattgatggcagttccaccaggcctaatcgccacacaccagcgaaggcaggctatactatagtacaagccactagcccacctcttaaaacctctcattttctttccatcgtagaaatctatcctcaaggaaataacttttcagtgttccatctgctgttctatctgctattctactactcctcaaggattattcaggccccctcccttccctacacatcaagctcgaggatttgcctcagcccaggactggcaaattagctttactcaacatgccctgagtcacaaaaactaaaatacctcttagtctaagtagacactttcactagataagtagaggcctttcctacagggtctgagaaggccaccacagtcatttcttcccctctgtcagacataattcctcagtttagccttcccacctctatagagtctgataacagaccagcctttattagtcaaatcagccaagcattttttcaggctcttggtattcagtgacagactaatggtctattaaaaacacacctcaccaagctcagccaccaacttaaaaaggactggacaatacttttaccactttcccttctcagaagtcagacctgtcctcagaatcctacaaggtacagcccatttaagctcctgtgtatacgctcctttttattaggccccagtctcattccagacaccagaccaacttagactgtgccccaaaaaacttgtcatccctactattttctgtctggtcatactcctattctccgttctcaactactcatgcatgccctgctcttgtttacactgccagtttacactgtttctccaagccattacagctgatatctcctcgtgctatccccaaactgccactcttaactcctgaagtaaataaataatctttgctggcaggactatgctgaatctccttaggcactctaatcagatgtcctaggtcctcccaattcttagatcttttccatttagtttttcaattcatacaaaactgtatccaggccatcaccaataattctacacgacaaatgtttcttctaacaaccccacaatatcaccccttaccacaaaatcttccttcagcttaatctctcccactttaggttcccacgctgcccctaatcccgcttgaagcagccctgagaaacatcgcccattctctctccataccaccccccaaaaattttcgccaccccaagacttcaacactattttgttttatttttcttattaatataagaaggcaggaatgtcaggcctctgagcccaagctaagccatcgcatcccctgtgacttgcacgtatatgcccagatggcctgaagtaactgaagaatcacaaaagaagtaaaaaggccctgccccgccttaactgatgacattccaccattgtgatttgttcctgccccaccttaactgagtgattaaccctgtgaatttccttctcctggctcagaagctcccccactgagcaccttgtgacccccccacccctgcccaccagagaacaaccccctttgactgtaattttctattgccttcccaaatcctataaaacggccccacccctatctcccttccctgactctcttttcggactcagcccacctgcacccaggtgaaataaacagccatgttgctcacaaaaaagaaaagaaaagaaaagaaaagtagaaatgcaatcagtcagaatatgatttcagaaatccagaagaaaaatgttgtgcatatgaatccaatgacagagagaagaaaggagatggatttgagagatttttaaggtatagaattggcaagatttagttacagatccaaaatagagagtgacagagagaaccacatttttctgatttgggtaataaaatgtatggagtttccaataacagaaaatactgggaaaaaaagataatcagatctgaggaaaaggagggaaacatttaagtaattatgtaacaaaccaagtgaaaatatctcgtatcagatatgaaagttattatgtataatacatcttaagaaattctggctcaaacatataaggaagaggttgaagttcttagaatgaaaatcttaattctcaatgtaaactttgagcaaatacattaatagagattgtgaactttctgcaactggtaataagaaaagataaaatcaactttttgaaaaaagcaacatccagcattaaacactaggggggaagcataggatgcacagaaattacaagttaaaacagaaagtaaaaattctggtctagattagcatatggattatgcagaataagacagaagattctgcaggaaataaactgtgaaatctcaaaattaacagaatgacacctctcatgaatagagaagcaagaattttcaacaaatattagccagtcaaatccagcaaaatgtaataaagatattacattatgaccaagtggaatttatctcagggatgcaagactgactcaaaattttaaaatcaattgatataattaaccacagtaacagaataaagaagaaaatcatattattatttcaataggtgaagaaaaatcacttaaaaaaattaaacactgggcccaaactctcagaaaactaggaatagaagggaatgttctcaatttaataaggtacctctaatgaaaacccacagctaacattgtagttaatagtgaaatactgaacacttccccttgggatcaagaataagacaaatgcattcactcacattactcctattagcatagtactgaaagtaccataaggcaagaaaaacaaataaaatatagacagattgtagagaagggagtagaactgttgctatttgccaatgttgtgcttgtgtatgtagaatatcctaaggaatcaacacaactctagaggtaaagagtaaatttatcaggttcttttaattcaaggtcaattaacaaaaataaattgtatttctacatattcaaagcaaataattggaaaattaaaatttttaaattatcatgtataatagcatcaaaaccataaaacatttagaaacaaatttaacaaaatatgtgctggatctttcaaactgcaaaacactgctgaaaaaaattaaaggtcaaaataaacggggagatgtaccatgtgtcttggttggaagactccatgttattaagatgcccattctccataaattgatctacagattcaacacaattgcagttaagaattccatagatctttttttttagaaactgacaaggtgattctctctctctctttctcacacacacacacacacacacacacacatcttagattactatatatttgtgaaaaacatacatatatttgtacatgcgtgtacaaagaatgtaaatagttgaaacaattttgaaaaagaacaaagttgaagtacttatgtaaccagatttcaggagttaaagctacattacttgagatagtgaagtaagaatatatgtataaattaatggaacagaaaagagtgcccagaaagagactcacgcatagatgtgcaattatttttaataaagtcagcaaggtagctcaatgggaaagaaaattctttttaacaaatggtgctaaattaactgcatatgcccatggaaaaacatgaaccttacaccatgaataataattaccttgaaatagactgtaaacttaaacgtaaaagccaaaactaaaaaaaaaaaaaaacttttagaagaaaatatataagaaaatattcaggactttggggtagacaaagacgttttagcaaaaatgcaaaaggcatacaccatcaatgaaaattggtaagttggacaaaatttgaaacataagctctctggaagacattattaagaaaacgaaatggcaagccacagactagaagaaaatagtcacaatacatatatatatcagacaagatacatgtgtcaagattttatttagaactttaaagttttgattagaagatgaacaacccactttaaaaaaaaaagaggacaagtactaagcagatatttcacacacaaaaaaagtttatgaatcaccaataaggacataaaaagatgttcatcattaatcataaggaaaattacattagtccattctcacactgctataaagatattagctgagactgggtgatttataaaggaaagagttttaattgactcacagttccacatggctggggaggcctagggaaacttgtaatcatggcggaaggtgaaggagaagcaggcaccttcctcacaaggtgggaagagagagagcatgcttgaaggaggaagtgccacttttttcaaccatcagctctcatgagaatttactcactatcatgagaacagcatgggggaaaccattccctgatccagtcacctcccaccaagtccctctctcaataagtggtgattacaattagagatgagatttgtgtggggacacagagccaaaccatatcaaaaatgcaaattaaaaccacagtgaaataccactacacatccacgagaatggccaaaatgaaaaatacttacaatgccaaatgctggtaagaatgtggagcaactgaaactttcgtgcactgttgctgaaagtgtaaaatggtacaaatacctggaaaacagttttgtattttctttggtttttttttgtttgtgtgtttgtttgtttgagacaggatcttgctctgttgcccaggctggagtccaatgacatgtcatatctcaccacaaacttgacctacccagctcaaacaatcctcccgcctcagcctccctgagtagcagggactacaggtgcatgccaccatacccagctacttttttttttttttttttttttgtagagacgaggtctctctatgttgctcaggctggtctaaaactcctgagctgaagtgatcctcttgccttggcctcccaaagttctgggattacaggcgtgagccaccatgcctggccttttcttcattttcatgtgaagttaaacatctattcatcatataacctaacaattctttcccctgttttacgcaagaaaaatgaaaacatgtatctgcaaaaggatttgtacgtaaggattcataggaattatattcatcataacccaaaactggaaataacccacgttattcagtaagttatatcaatatttgaatggataaacaaatgatggcatattcatacaacagaatagttctgagtcatgttcatgttctatggacacttctgtaaattcaatctcattttctcatttaataagcataattcctgctagagtaggagctataaaatatgctgccccttaaatgatgttgaagaaatttccatattaatgattcataattacttgtcatgttccatactcactcatattgaaccccaaagttatgttatcatgtgctagtctttctaaatcatttgctaaacaaatcaaggaatcagagagtatggcatgtatgacaacacctcatgtcattatagatattttaagtattttaaatagctcttcatcctcattaaaactgggaacactgtggagacttctagatttatgcattatttttacttatataacacagcttttcttcatgtcctcttcttcactgcttcacaaaccaacctgacatgtttaaaaactttatattccaatgtacatttagggaatattttataaagagacacagaattgcccagcacttcactcaaatgttactcattagacttacctcttcccaggctcttcggactctcagcagctagttcctctcacagtctcaaacccccttctcctcccccaatcacctatcttccctctctctccactcatttctcccagcaaccactccatctctctgctggtctcttttttttcactcctttctgtatctctcagcatttctcatgcagaacaatttaattctcactccccttcaattttgaattcaagcagttggccctctgcttaatactgccttaagcattatccgaaaatgaagatttcatttcaaagttctcaaattaccaaaacttattctttttgtggataaaaggaattgtaagtaacatctctattgttttacccttattttaggatagtttcataatgcataattaatgctctaaaaatagttgtaaaagtttcctatgaaatgcatgattaaaatataagattgccttaatgaaaaaatagctcatgaatttttattatatttttaaagtttaacaacaaagaagatatgccaagcaaaaatataacaatttcttacatgtggaacatttttaggtataaaacagaaaaatataattttcatggaataactactagctacaaccatatgctaatattttctaaggtgatattgtaaccttaaaaagcccagagatttcaaattagccaaagatgtgtcagttgagttattcatttatagtaagctttcaggccttaggacatcacctatgaactaaaaatgctgagtcaaaagcctaccaagtgactcatcctttcttatcttctttttccacaataaccatctttagtcactaattccctaagtctagagggaaggaactgacccaaatgccttaaaaaagtagaactttcttcccaatggacgtttgaagaaagacccccaccagcactcgaaattgccaatcttcctaaattttgaaaaagtattaaatacatacatctgaataaaattattatactcacacaggaatatattttcctctctgcaggaaaaatagagaaaaccataaatattttatcagaatgtaattgttcagtgagccatcatttcaaccacttaggaaaaatggagagaagaaagtcacgttcaattattatttgacactaacaccacatacaaaacaaaaataagtttaagataacatctataagtataaatgctatataaatactagaaaatatttaatgtgtgtgtgtgtgtgtgtgagagagagagagagagagagagagagagagagagagagagacagagagaggagattgcttactatttggtataacttgcaaaaaaaaatattcatttggttgtagggcaaacctagattggaaggataagaatcattgcacttcacttcctccaggatccatctgtcatctttggcttagagacagataactgttttcacttaatttgttttccagttcatgtttctcagatgtttaacatggtattttggaaaaggcaaaactatggagacaggaaaaagatcaggggttgccaggagtttaagggaagggaaggatgaataggcagagcatagagattattagggcaatgaaattattctgtatgatactgtaatggtagatatgtgcccttatgcatctgtcaaaagccacaataagtaaaatctaatgtaaactatggattttagtgataatatattaatattggcttatcaactgaaacaaatgtacaactaatacaatgtctcaggaacagggaaaactgagatgagagggtaatataggaaatctctttactttcaactcatttttctacaaacctaaaactgatataaaaagaagtctattagttaaaattcagaaaaggagaaaaacattgataagaaaatacttttttaaatggaagacatataaaaaaacataaattaggccttactgaggatttctgtgggtcactgaagtggtgtttgcataacatattacatatgaaattttcctaaaactgtccttgagtacatgtccctttttcatgtttttgtttcaatcattttgggggtacaggtagttttcggttacatgaataagttattttgtggtgatttctgaaattttggtgcacccgtcacccaagcagtgtacactgtactcaatatgtagtctttttttcctcacctccctcccacccttcgccccaagtccccaaagtccattatagcattcttatgcctttatgtcctcacagattagctcccacttataagtgagaacatacgatatttggttttccattcctgagttacttcacttagaataatggcctctagttccatccaagttgctgcaaaagacattatttcattcctttttatggctgagtagtattccacggtgtatatacccacattttctttacccactcattggttgatgggcgcttaggttcgttctatatctttgcaattgcgaattgtgctgctatagacatgcatgtgcatgtatcttttttacataacgtacgtcccttttttaaaaataattattttgtagagaagagatcttgctaagttgcccagctggccttgaactcctggcatcaagcaatcctcccgcctcagcctcctgaagtgctgggattacaggcataagccatcgcgcccagcccatatgtcttcctttttcctaggtctgctcctcacagcagcagcttaaatctttccttctatttctctctaacctcacaggcccttgctaattttgctcctcacttgtagcatcttttttttatttttgtcatgaaaagaaatttagactttcaggcttccggatccagcgtgttcatctgttatgctgttaacagtatcacaacaaaagcatggtaggtgagtaagacaaaaagagagccctcctcccaaggtagattatggttgggtgggagagaggtggctgggaaggtttgcagacctgctttcaccatcaccatcttgccacctgtctgaggagtgaggaaaaggagaagaaaggtttccagcatggcaacagtgtggccaggagtgcaattcacttgagatataggagaggaaatgaattcctgggggaaagtgagggatttgaccaatattcaatccaactataatgtatcccatactacaggtaagattaagttgccagttacatagaggaaaaactcatgatgaatagtaatttgaacaaggctatatgtagcactgcattcactagtgtaagaatcttggatctcatctaccagtgttcagaagagtatcgagagagtatagacagtagctagaaaaggcacttactaaacttctttacatgccctttctgttgtttctttctgaattttctgaattaaagcaatgcacaacacattttgagagtaaaagtaaagagcatttttggttaaattaacatgagtactttatccagatcttttgctgacccatgcttctcaatttggattttttttctacttataaaaatgctacacagaaaatgttggggtatagagctgtcatttccttccttccttccttccttgcttccttccttccttccttcctaagtaagataatacaaaagaaataaaagacgtgctgtctcataggagatgagacacgtctatataagtcctaggaattctaatttaatttgcataccaaggacatctaaaggagaaaaatgtattctaattagggtctggcttctaatgtattataaaagtaacttgttaaatgagattttgtgttttactggaaaattctttttcataaaattattgactgaagattagtccttgataagcaaatcaattttgtaattcaaacatggctatagaaattcaatgcatttttcttttttaaaattgtattttattttgagaaagcatctcactctgtcacccaggctggaatgcagtggcctgatctcggctcactgcaacctctgcctcccagattcaagtgattctcatggcttagcctcccaagtaactgagattataggcatgtgaccatgtccagctaattttttctatttttagtagggacggggtttcattgtgttggccagactggtctcaaactcctggcttcaagtcatccgcccacctcagccttccaaagtgctgagattacaggcgtcgagctaccatgcccagcctcagtgcattttttttacagtcatagagcaatgcctataatcatccttcatacatctcagatcaaaacaaataattctgtcttacaagaggagtgcccttagacattaaataataaattcgctaaaggcattattttatatatggtttgtgacatagtgcctatgaaaacctaattcaaaaaaataataaattacaaaatagctactaagggtataaggagacattaactatggattagaaaaaccttcttaaagcagacagattctcagaaagtgttgaaagagactggtcgtcacaaaggttgagttaaacatgatttaggtgagtatatttcattatgtacattaatgtaagttgttgtaagacctcaagtaagacatataagaaataaaaacacattggtgtacaacatgacaacttttcttcaccagctgcatttgctgagaatccaaaggacatttcagatgagggggtgatgaaagtcaaggcagagacatgtgaaccggaaagatgagcataagaaaggcagaagcccatctagggagacatagggacaggacagagaaggacagagtacaagaaacaaggaggaggaattacatttttaaatgcattaccaattaaaagaaaaaaaaatcagtgtaaaaataaaggctttgcctctaactagttttgtgactttgggcagccattccacttccttggcctcagatattgggcacagtaacttccaggtatttactgctctattacttaatcattccactatagctatgtttatgttcacatgttatttttacttcacagaatgattgttttaattcaggtgagtgcaataaacagatgacaaaagactgaagtgttttctaagatgagcaagaatgatgatgcccagctaactggaggatgcttttgtttcaaaccagaaacaagtggtaataggatatatgagattaaggatccaacttagtgaatgaacacaattaccttcctgccataattacatatttttgtatcctgtttcttgcagtaagcaagcacctaaagcacccctggctaagcctaccatcgaactcttcaaaatgtttccattcatcagccaagtagcagtacattatgttcccttttgttttattgatgacatattttaatcaactttattgaagtgtaattttcacatgtaaactacactcatgttaactgtacatttcaatgagtttttgcaaatgtatatactatgtaaccaccactacagtcaagatatactatacgcccatcacctctgaagctctttgtgtcctttctaaatcagtgagctgtccccctttccagcctgttcccaggcaaacattgaccttcactctgtcactttagattagtttcttataaatgtaatcatacagtatgtactgttcagaatctggttacttttactcagcgtaatactttagagattcatctatggtgttgcatttaccagtacattgttctgttttattgttgagtaacactctatgttataaatgtaccattatttgtttatccaccaccatttgatgaacacctgggttatttccatttctggcaattgtgaataaggttgctatgaacattcatgcatcagagcctgttaacttttcatttctcttggataaaaatctaggaggagaattactaaatcatatgtaaagggtatgtcaaccttataataaactgtcaaactgttttccaaagtgattgtacatgtatcctgccaaaatcaatgtatgatagttccaatggttctacatcctggccaacacttagtatggttggtcgtataaatttaggtaacctaaaaggtttgaagttgtatttcataatggttttaatttgtatttctctgatgattaatgatgttgagcatcttttcttgtgcttattggccatttgtattttgcttctccttcctctcctttgcgtcgttgctgtcatttatattttacttctacatgtcttataaactaccaaagcacatcactatttttactttaagcaatcaaatgctttttaaagatactaaaaattaaggccaaatatccccatatttaagcatatatttagtgttgccagtgctcttcatttcattgtgttcatgcaaatttctaactgatatgatttcctctctacatgaagaacttcctttaacatttcttctgacttaggtctgctgaaaacaaatgttttctatttttttctgagagtgtctttaatttggttttcttctgggggggagttttgctgtttatagacttttagattgatagcctttttaaaaaatgtatttcagcactttatagatgtccttgcattgtcctctgctcacataattacagataagaaatctactgtaagttttatgtttttttctttgtaatgtaatgtcttttttctttagttgctttttaaaaatatcattttctggtagttttcagatatttgattatgatgtaccttgaggtgtttatgtaagcattgtgtgcatctatcctgtttggggtccatttaagcttttgggatctgcggatttaagttttcattagtttcggaaaatttggagccatcatttcttcacatatttttttagtgcccctacgatctaattatacctatataaataggtctgtacaatactgtcctcagaggtcaccaaggctctgttagttttctttcttttatctctttttgttttcaataggttctattacaatatattcaagtatgctgatcttttctgctgcgctattcattctgctattactcctatccagaatttttttatatattgtattttttattcctataagttctatttcatttttttaacaatttatgttacttccctcactatgctcatgtttttaataataaacataattatactggctattttaacatctttatctgttaattctaacaacatttgtcattttggtactttttcctatttactgatctgtatccagttatgggtatattgtccttattcttggcatgtttactaacttttattggatgctagatatggtaaatgtaacactcttaagcatctagatattgttttcttcctttacaaaaacaacttgaatatcaatttcatgactttcaggcctgtttattcgctttgctggagaacgtctaatagtagcttcactccagtgctggttcactcctgcttgtaaggcaggactccaggagtctccaccaaatttcccagatcatcatcaaggacttcattctggaaggccagagctcaaatgtcttcctgtcctttgtgagctctgggaatttttcagtttgcaactccttggccatccttagcccatcttcgtggagcttaattctacacatgggcagcttggtactcaacaaagatcagagaggagcccatgcaggtttatggagttctcttattgagtgcccccttttccaaaactttgctagctgcctcagattctccaactctggtctccattttcacaactcatcaatgattacaagatctgtttggattttcctccctgtgccaacagttagaaattgactctaagaagaaagccaagacaatcataggattcgtagttgttactattctcagaaagatcacagcactgtgctgtttttctccaaccactaaagatagttgttttattattttgtttagttgtttaattgttcactatggaaagttagagctggtcttggatactttgtttttaaccaaactttgataaaggattttttccagggtgggattgcatagtaagtatggactcatactaggtggagtttacatggcaacttctcttagaaattgctacacatgggcattcaaattggtaataaggaagtcaaactgttgctgtttgctgatgacatgatcatatacctagaaaactggaaagactcatccaaaaagctcctagaactggtaaataaattcagcaaagtttcaggatacaaaattaacatacacaaatcagtagctctgctatacaccaacagcgaccaagctaagaatcaaatcaagaactcaacccctttcacaataactgcaaaaaaataaaataaaatacttaggaatatacctaaccaaggaggttaaagatctctacaatgaaaactacaaaacactgctgaaagaaatcatagatgaaacaaatggaaacacatcccatgctcatggatgggcagaatcaatactgtgaaaatgatcacactgccaaaagcaatctacaaattcaatgcaattcccgtcaaaataccaccattatttttcacagaattagaaaacacaattctaaaattcatatgacaccaaaaaaagaacccacatggccaaagaaagcctaagcaaaatgaacaaatccaaaggcatcacattacccgactacgaggaagccatagtcaccaaaacagcatggtactggtataaaaataggcatatagaccaatggaacagaatagagaacccagaaataaagccaaatacttacagtcaactgatttttgacaaagcaaacaaaaacataaaatggagaaagaacaccctattcaacaaatgatgctaggataattgacaagtgtacactgcttgagtgagggggtgcagaaatcgccactaaagaacttattcatgtaaccaaataccacatgttccccaaaaatctattgaaatttaattaaaaaaatgctacctgaagcaacgtcttgtcattacaacttcaatattttaacaaagcaatgtattgtaattacaacttcaatattttaacaaagacatttactgttatgttataactggttgtagacaatcacctctgaccgcactaagctcaaaagtaccatatatcatagacaacaaatatagccatttaaaattaatttaattaaattcttcacatgtagaagaatgaaattggatcctcatctctcaccctattttaaaaaatcaactcataaaagatcaaagacttaaatctaagacctgaaaccataaagattctaaaatataacattggaaaaaccttctagacattagcttagggaaagacttcatgaccaagaacccaaaagcaaatgtaacaaaaacaaagataaatcgatgggacttaagtaaagtaaaaggctcttgcacagcaaaagaaataatcagcagagtaaacagacaacccacagagtgggagaaaatcttgacaatgtatacatccaacaaaagattaatatccagaatctacaaggaacgcaaacaaatcagcaagatttcttcccatcaaaaagtggactaaggacacaaataggcagttctcaaaagaagttatacaaatggccaacaaacatgaaaaatttctcgacatcactaattatcagggaaatgcaaatcaaaattacaatgcgataccacctcactcctgcaagaatggccataatcaaaaaatcaaaaaataagagatgttggcgtggcagtggtagaaagggaacacctttacactgttggtgggaatgtaaactagtacaaccactatggaaaatagtgtggagattccttaaagaactaaaagtagatctaccatttgatccagcaatcccactattgcgtatctacccagaggaaaagaagtcattatacgaaaaagatacctgcacgtgcatgtttacagcaggacaatttgcgattgcaaaaatgtggaaccagccaaaacgcccatcaaccagcgagaggataaagaaaatgtggtatgtatgtgtgtaaaaatatggaatactactcagccacaaaaaggaacaaaataaggcatttgctgcaacctggataaaattggagactattattctaagtgaagtaactcaggaatggaaaactgaacatgttctcactcataaatgggagctaagctatgaggacacaaaggaataagacactgttggtgggactgtaaactagttcaaccattgtggaagacagtgtggcgattcctcaaggatctagaactagaaataccatttgacccagccatcccattactgggtatatacccaaaggattataaatcatgctgctataaagacacatgcacacatatgtttattacagcactattcacaatagcaaagacttggaaccaacccaaatgtccatcaatgatagactggattaagaaaatgtggcacatatataccgtggaatactatgcagccataaaaaaggatgagttcttgtcctttgttagggacatggatgaagctggaaaccatcattctcagcaaactattgcaaggataaaaacccaaacaccgcatgttctcactcataggtgggaattgaacaatgagaacacttggactcaggaaggggaacatcacacaccggggcctgtcgtggggtggtgggaggggggagggagagcgttaggaggtatacctaatgtaaatgacgagttaatgggtgcagcacaccaatatgacacatgaatacatatgtaacaaacctgcacattgtgcacatgtaccctagaacttaaagtataataataaaataataataataataataaaaagaatgatacaatggactttggggaattgggggaaagtgtgtgagggggtgagggataaaagactacacattgagtagagtgtacactgctcaggtgaggggtgcatcaaaatctcagaaatcaccactaaagaacttattcatgtaaccaaacaccacctgttccccagaaacctattgaaatttaaagaaaaagaaattgctaccagaagcaatgtcttgtaattacaacttcaatattttaacaaagacatttactgttatgttataactggttgtagacaatcacctctgaccacactaatcccaaaagtaccatatatcagagacaacaaatatagccatttttttgaaagccattttataataatttaatttagccaaaaagtttgtaattttagattacatatgcacacagaaatttattatcatcacagtacagccaaattgtcactttgtttcaccagtgtgtgtatatatgtatacacatattcaaattgtgacggcttcattaagaatgctaagctgtttaaagcattctctgattgtttctaatactcccaaatggattccaccaatgtttccatttggccaatctgacattcagctgtgtcacgtagtggcatccaacatcctctccttcattgaaccttactgaagaacctaacgcctgctccactgacggtgacaccaacccaaaagctgtgccatgcatgctgaatcctgaagatctcaaaaccattacactttgggattccaaagcagaactggacccatgaagagtcaaggaggaatgggtctcaaagtatctccagtatgtccataatattacaaaatctttcatgcaaacaggttttccaacttcttgcttttctgttctaaccccaaaggtccaattccagtccaaagagctaggctgggaatatattccatgccatcccttcaattttcctggttggcccattttctacgatccctgccttcaaccaaactcagagcttggtggcaaaacagatgctgcatgcataccaacaggacatagactgactgtgtgtgtgtgtgtgtgtgtgtgtgtgtgtgtgtgtgttcatgtgcaagtgtacatgtctatgttttgactgggggtgaaagggaggctatggaatgttttacattccaggaatatctgcatcacaatccagacagtgaaaaatacattttaataggctattaaaaactcactgaaatttcagaagccatcaaaatggtacctacataatttatagtttataatgtatacattttactcttttaaattcctttagtattttcaaaatccaaaggattctgaagtatcttaaaataattaccattttaagacacttaaagtaagcaatttaggctgggcgcagtgactcacgcctgtaatcccagcactttgggaggttgaggtggaagaattgctggaacccaggaggcagaggttgcagtgacctgagatcacactactacactgcagccagagtgacagagtaagactccatctcaaaaaaaagaaaagtaagcaatttagatgctcactaaggtgtcattttaatataaaagagtataatgagtcatagcatgcacaagttagaagacaaagaaaattgtgaaaaatatgctcaagaaaatatactacagaaaataacctggggaactatgtaataaattctacaatgcctacaattaaagtaaataaatatcaaactctactatgctgtgtaaaatatgcagaagagcatctaacatctattttgcaaagcatttacacagcttacagaatatttacaattcataatcatcttttgttttacttagagatgaggtctcactatgttgtacaggcttgactcaaacttctggcctcaagcgatcctcccacctcagctgcccaagtagatgggactacaggcatgcaccaccacacccagccacaagaattttgtcaataatacctctcttattaatgttagccatgatttggtaaatataagctccaaaaagctaaagccatttattcaaataagtgactttattaaagtcattgtttaaaatttaagtacatcaagaaaatgaaaatttataacaatatatttcctcttaaatgtgagtaagcttagtacaatcatgctaagaaaacaaaataatttaattgataagaatcatgttttggcaaaaaaaaaaagtcatcaatacaattactctaagatcactaaagaactaggaaaacaagagcataattaggaaatcctttgttccagggcatgatgagatgaacttgccttataaagtcatttatcacaaccctaagttgcataaatgtaatgataaaaggtccattaccaaatttgcacttggaaatcatttcaagataccctccctttgtggagcggggaataaacttacatgccaacaaaatatatgagatatagaataatcttcagaaaatatagctaagtcaatgtgaatgctagtaaaactttttaaaaacatacaaaaaaagaaggaaatgacaaatagttcccttaaacttttcaagactttccttcaccaagcttcaacttaaggcttttctcatacaactggaatagatttgtaatttttcccccttataattctctttgatgacctccagattgtaggacagcacatcctgccaagcattttaagtgcacattcattttgttacattgaaaaaaccctaaaggttcaaattctatctaattaagtacattcctcatctcatggttcaattaatttcactcaccataaagcatatgtgagtctcttccagccacttcctatttaatttatttcaactcccagaaaactggctccttcttaactcacacttccagattaccctatttccttataattcactgttcccctatcccccttctatagggggatatatagattagtatatagtttatatagtatatagattattacttttattttcgttttatagttgagaaagattattactttcattttcattttatagttgaaaaagtgagcacttactatgtgtcaggttctattctagtccattgccatctactctcctctgctgaggaagtgacagttctgagttctatcaccattgattcagatggctgattcattcttgatctacatataaacggaatcttacagcatatactctttttgtctggcttctctgcttaacataatgttctgaagatttacccacattgctgtaggaagagctggtttgattcccagctcaaatactctagtcatgagacctccacacagaactgaagctccaaaggaaaaggaacttttatcttttttgcagtgttctttatcttgattagagtgatgattacccagttgtagacatttgtcaggatccatcaagctctatccttgaaatctgtgcattttactacatgtaattatggcttaaaaatatagtaaaaaaattttcaaactcctgttctcccaaccatactttctcttcatttatcaaaggcttcaacaacctctaaactattttttttaatactttacattctagggtacatgtgcacaacgtgcaggtttgttacatatgtatacatatgtcatattggtgtgctgcacccattaactcgtcatttacattaggtatatctcctaacgctatccctccccactcccaccaccccacaacaggccccagtgtgtgatgttccccttcctgggtccaagtgttctcattgttcaattcccacctatgagtgagaacatgcggtgtttgggtttgtccttgccatagtttgctgagaatgatggtttccagcttcatccatgtccctacaaaggacatgaactcatccttttttatggctgcatagtatttcatggtatatatgtgccacattttcttaatccagtctatcattgatggacatttgggttggttccaagtctttgctattgtgaatagtgctgcaataaacatatgtgtgcatgtgtctttatagcagcatgatttataatcctttgggtatatacccagtaatgggatggctgggtcaaatggtatttctagttctagatccttgaggaatcgccacactgacttccacaatggttgaactagtttacagtcccaccaacagtgtaaaagtgttcctatttctccacatcctctccagcatctgttgtttcctgactttttaatgatcgccattctaactggtatgagatggtatttcattgtggttttgatttgcatttctctgatggccagtgatgatgagcattttttcatgtgtctgttggctgcctaaatgtcttcttttgagaagtgtcggttcatatccttcgcccactttttgatggagttgtttttttcttgtaaatttgtttgagttctttgtagattctggatattagcgctttgtcagatgagtagtttgcaaaaattttctcccattttgtaggttgcctgttcactctgatggtagtttcttttgctgtgcagaagctctttagtttaattagatcccatttgtcaattttggcttttgttgccattgcttttggtgttttagacatgaagtccttgtgcatgcctatgtcctgaatggtattgcctaggttttcttctagagtttttatggttttaggtctaacatttaagactttaatctatcttgaataaatttttgtataaggtgtacggaagggatccagtttcagctttctgcatatggctagccagttttcccagcaccgtttattaaatagggaatcctttccccatttcttgtttttgtcaggtttgtcaaagatcatatggttgtagatgtgtggtattatttctgggggcttttttttttttttttgtagtttacagacgtaaaacaggatcctggcagttcagcctgctctctagcattcattaacatgccacagtctagcaggcagatcaccttgcaccaaattcacctttaaatacttaccctttgctagtttttaaattgtgttcccagtccttttctcaagcttcattttattttagtctctagtcttcctaactcttgcttcatttgtcttaggttatgttcgtattcttccatttaatatggacacgtgtgcctagtatggtaatttgatgtgcaataaacattggtttatttagttttctcctgtttttcatttccattgtgatctatcgtgtcttgctgtttctagtcagttgaccacacttagtttctccttcctgtaatctgctgtccaagtaaacaactgcttcacttttatgattccgagatgttcacttaaggttctcacttacttccaagttttgaacctgctttcttattagtctgaaagaagaccagaacactgcttccctcaatatatacactttcttcttataaatgaaaatttcagcaaatactccgcttttagtagactaactcctccaccagctgtccaaacatttgaaggtcctgcttctcaactatgttttgccttagtgctactattattcacagctccctacagggtaagaggtctatagtatacatcctcacaaatatacttttggtttctctctccaatggagagagaatactcagaaaatcataattggagggccttctcaacactgtttcttccttttctattaaatccattttctaaagaaaaaaattataacaacatatatttattcaagaataaataagttcattatattattattgaccctatttcaatgatatctatgggaattatatttccatgcttgttgttactttttaaattatctatttataagtgtacatatgtgagaataaatagtggtaaggtttaatctgacagtattacattaatagtatcaaacaagttaaatatagttttgagtgatatagttttgataatacagcataagattttgaattaatatgaatataggaacttttataatactttaaaataaaacctaccagtttaagttgaaattcaataaaattattaatattcagataatgcattcatacatatacatatacatattatacatatgcatacatgtaatttcttagctacatctctaatgattagatagataggggaaagaatccattctgagaaagaaaatggtactattgggtgatgagcagagtcctcagagaataaaataaaacagttcatttctgtttctatcaagtcgtttatcaattcccactatatctgtcttcaaagtgcttttttgcccgttatttcccccagggtcctggctctcagacaagaagagaggatagcactggaacctctagatcccttttcttaacttggactgcaacaacaaaatatcagagactagatgacttaaacaacagacacctattttcttacagtcctagaggctgagaagttcgagatcagagcaccagcatggtcgggttcgtggtgaaggctttcctctcagcccaccatatggctggctgccttctcactgtatcatcacacagcagagacgaaaatcttgtgtttcttcctcttcttataagaacattaatcccatcatggggactctaccttcatgatatcatctaaatctgattatctcccaatgggcccacctcctaataccattacattgggggttaaggcttcaacatatgaaattgggggagacacaaacattccttttatgatactttccaattcctttagaaacctagaaacaattcagctacaagacacaattttcacttacactgccacctcttaaagctctagtgtattgttatcctcacctagctggacattctgcagctgctctgcaaaaatactctccatccttccctaccttgctcagtgccacagagagctagctttgtgggctgcatccagaatgcccctgaccttagtcttctagctgcgtcggccaagtagaggccctgcaaaagatcagagtaaagaagaagaatgaatcttaattttttccttcaagggcccaccagtatctgtatttctcttccgaaggccacactatcaggtagattttgggttcagctcaccagcccttactctgtccttcaggcctatggttggtaactgcctccagctggtgctggtgcttcctcttacctgtcccacacccttgaaaataccccctcattgcactcccctcaatgacatcacccatttccattcaggactttgtctgtgtacacagtcccagtctcctttctccatatcaccccaaatctcctcctattagcctagtttgtcacgagcctatgccccaaagggggaagggcaagtgccaagccataaggaagggtcaagggcaggaacaacccacgctgcctcataaaggagtggcttgtataagtaataaattcaagtcacacgataaacagagatctatgtatggacattattaagagttaaaaactgaccatatttggcttaaaaatatgaaaatcttacccagagttaaagctttgcctctcagctgccaaaataaacactgcagtatacttaccaacttccaactcttataatgttagaatgtaaccacttctctgaagttttacctgctataatttaggcataactaggtttttcttttaacttgaaaaatatgcttttaaattgcttttattatattgatgggacaattaagaaatgataagaatcactctgtgggggaaatcaagggctctcaaagaaggttctcaaaagcaggcttggttcaagtctcatctcactggaatcattgagaagcatcttctgggatcacttccagaaggagaatgtactcagagactaaacagctgcaggttctacttgctcccctattcttccccaactccaagatttttagataaaattaggcccaaaattaatataatgaacagcataaaatggaaaagtaagtaacagaaaagaaacctgaggggttggaaagtatcctatcttggtccattgcaatgttctctttttattttcaatatccactgagtttggaaaaacgtgcccctttgtaaatttctaggttgacatataaaatgccttcttcaccacagtttaaatagctgcacagaaagaaatttccagaatattataaatactaacattacccttttaagtatatccaataaaatataaatattacatcaatatgatgccatcatcatctattttacaaacatatgagcaaatacatgctcaactcttcaagtgtcaaaaatttggcttggtcctttttttcctcaaaacaattattctgtgtgatttctcctgcagaatctataatagaatattattttaaagtaattttttattatactttaagttctgggatacatgtgcagaacatgcaggtttgttacataggtatacatgtgccatggtggtttgctgcacccatcaacccatcatctacattaggtatttctcctaatgctatccctccccttgcccccaactccccgacaggccctggtgtgtgatgttcccctccctgtgtccatgtattcttactgttcaacttacgagtgagaacatgcggtgtttggttttctgttcttgtgttagtttgctaagaatgatcatttccagcttcatccatgactctgcaaaggacatgaactcattcttttttatggctgcatagtgttccatggtgcatatgtgccacattttctttatacagtctatatttaatgctaaaattatttttgatcaccttagcatatttctctgccacaaaaatacgcctataaaatgaaattaatttttgctgcctatgataataatacctaagaattacaggtttccttctggagtattgttttaattattagtagttcacaataataaataatagtaattactattaaaaacagtagtatacattttatttatcaattaaaaacaaattttaaactgtaataatagtatataattgatcaataaattataagtagtacacaaattttggtgaaaattgctaaacataaaaagaataatgtattggaaatgtttattttaatgagctggattagaggtaatgcttatgcactctgattgaagaagattttgctgccagtcctactgtaatttctcctttccccacgtcttcctcctggaggcttttacactaccgagtacagcagcatggtgagttcaggatgggtctgcatttctttgtaattctttatatttctgtataaaatgggaaaggagcaagctttttttttttttttttttttgagatagcatcttgttctgtctcccagtctggagcctgcagtcttgacctcctaggcttaagccatcctcccacctcagcctcctgggtacctggaagtacaggtacacacaaccacacccagcattttttgtttgttttgttttgtttggagaaatggaatctcactatgttgtcagagctggtctcaaactcctggcttcaagaaatcctcccactttggcctctcaaagtactaaaattacaggcatgagccactgtgcctggctgaaagaagcaaatttgaaaaaaaaggaaaaccacagacacagatcagttatctggcaaattagttttggtagagtatatagagaagtcaaacaaatgaaaactgattcccttaaaactacttttcagtgagccaagatcacgccattgcactccagcctggacaacagagccagactctgtctcaaaagaaaacaaaacaacaacaaaaacaaaaacaactacttttgctcatatgctctttggttagcttccaaatatctcccaatagaatctatagatgttattgtatttgtcctgttggcagacatgagaaaaactccccacataactctctgaaacagcagcacacgcccccttgcaacacactccccaccacagggaattgcccaattccgttatcttagagatgctgtttcacttaatcaacagattctgttactctaggaattaaaaattgatttggtaaaatttcaattactcaaatactggtaaaggttattctttgtctggccggacgcggtggctcactcctgtaatcccagcactttgggaggccgaggcgggcggatcatgaggtcaggagatcgagaccatcctgcccaacattgtgaaactccgtctctactaaaaatacaacaacaaaattagccaagggtgatggcaggcacctgtagtcccagctactcgggaggctgaggcgggagaatggcgtgaagccgggaggcggagcttgcagtgagtggagatggccccactgcactccagcctgggagacagagcaagactctttgtcttaaaaaaaaaaaaaaaaaaagtttattctttgtcaatattgcttcagttattttcttaagacaatttaaatcagcccagcaaaaatgagcaattaactgaaccagtcaataagccaatctttgctgggcccaaactacatgttctattttgtattagatcctgataaggtttcaaaataaataagaggcacagaccttatcttctacagtttttctggagaaaagagtatcatgcccccagaaaagatataactaatagcgcaatacactgtaagttcattcccacatgacaaatccaagggaaaaaaataactatgtaatattaagtttataaaatgaaataagaattttcatagtggagaaaatgttttaggttaaaaactattcaacttttagcttagaagtctgatgttgctctttgaatggcatatgtgttggctaacatcttgtacaaaaatgctagtgactaggaaaatgtaaatcaataaaataccatttctcatacactaggatggctataattaaaaaaacacataataactagtattcatggggacatggaaaacatgctagtaggaatgtaaaatggtgcagtcactttggaaaacagcctggcagttcctcaaaagattaaacatagagttaacatgattcactcctaggtatatacccaagagaaatgaaaacaagtgtgtattttaaaacatagatacaaatgttcaaagcagcattatttgttataacccaaaagtggaaataaccaaatgtccattaactgatgaacagatagcattgctaaaaaggaatattattcaccaataaaccttggaaacattaggctaagtgaaagacatcagtcacataaaccacatattgtatgaattcatttatagaaaatgcccacaataggcaaatctacacagacagaaagtagctcagtagttgcctaggacaggaggagatggaaagctcgggtgatgttagctaatgcgtctggatttcttttggggtaataaaaatgttttaaaatttattgtggtgattgatgattgtacaactctgtgaatatactaaaaactatattgtacacttcaaatttgtaaattatatgttagattaattatagctcaataaagctgttatttaaaaaaagaaacataaatatgtctaaatatttttctgtatttattccaacttttacttattctcccaaatcatacaaactacatacatttccttctatgattttagtctggcattttttgaggcatttcacagctatttgggtagaacctgcagccatgtgggtggctgtttccctggctggtgctccagggtcagcccactccccttggagaggcatgtgccactcccatggatttggaatgctatccacctgttttctccggccccccacttttgtttgttgttgaagaactagcaaagtcctgactatccaagtttctcaaattaattataactttctggtgttatcaatcagaaaatcagtagggaaaaattctaaacaataattggcccacaactaactttttatttgcctttgaaataatgtgtgcttttaatcacagatttaaattattaattccattttggatacaatatgagcactccaattgcagaatgttcacactgaagagggttgaaaggaaactatctgaggcatttctagtattcagaggaaagcaactacagaattgaacgtttgtttgagaatcaccataaaatgtgtaattcatatgcagataataaaagattcatgatttgatctttgagcttccagaacaatagcacctcactgtgtagaaaaataaagccaactatattacgcaagcacacaccttaaatattttattattgaaaaattcctttcaaataagtgtgatatctcactggatgagtccaggacgatgtataaagaaatgtgggtttatagcctggattcaacatttaataatcatggaaacttcgtcaaatctgtgaacttccctgagcctcagtttttttgtctctaatatgggtgtaatagcaataacccggcctgctcacaagatagttcttaggagcaatgtgacagtacttgcagaaaaatgtaaaagatgtgtataatattaagaattattactcagatgagcaaattggaccttattcagtatgaggccccctccctcccctccctttggttgccttatttgtaagcattgaccctctaagtaggctaaaatttattgagtatcttttctgaaaattacagagataaacattgtctcaagcattttcttttattattacgtttctgctatttgtcattgaagaacccaacgataagagaggttgactaacaaccaaatttatacctgagttttagatcagaaattaaaacctgggaggccgaggcgggtggattacgaagtcaggagatcgagaccatcctggctaacatggtgaaaccccgtctctactaacaatacaaaaaattagcctggcatggtggtgggcgcctgtagtcccagctacttgggaggctgaggcaggagaatggcgtgaacccgggaggcggagcttgcagtgaccagagatcgtgccactgcactccagcctgggcaacagagcaagattccacctcaaaaaaaaaaaaaaaaaattaaaagctaactctaaacttacatttttttttgtaatacaccatgcttttgggggaaattctcccttctgtaatctaaacaacctcccttcctttaaaacactcacattagaggatccaccatccatagctcctgaaaagggaagaggatgatgtgaagacgattatcaagctagggtggcgatacgtcctaatatgcctaggacagtccctgtgtaggctgattgtaattatcctgatgtaattgtgatgtaattatcaacaattccgccctctctttttactctcaaaaagttttggtttgaatctgaggtggttaacactgactctttacagtgaaggttaaccagaatcaccaagaaattacatatgtatttctcaactgtcatccctacatatcaaagtcatagatttctaaacgtgctaaagatgttcttcagctgggtgcgatggctcacacctgtaatcccagcactttggaaggccgaagcaggcggatcacttgagatcaggagttcaagaccagcctggccaacatggtgaaaccctgtctctacttaaaaaaaaacaaaaacaaaaactagctaggcatggtggcacatgcctgtattcccagctactcaggaggctgacgtggtagaatcactggaacccgggaggcagaggttgcagtgagccgagatcgcgccactgcactccagcctgggtgacagaggagactctatctcaaaaaaaaaaaaaaaaagataaaaggaaaagaaaaaagaagattttctttaagtttatgtagttagactaagctttatgtacatgtctgaagaagataaagtcctggtgaataattagactgaagaggcaggaaagacaagagaaatagagagcacataaatgaagaactgtgagacagcatgtgttaacatactcagagaaaaataatctactggctgataataagatatgttaaaaggcagtctggaaaagcaagatatttcctccagcatttgatgttttttcttcctaggaggcaagtagagtggataagagtgcatttttcattccccaaagagacattttagcaaggttgattgttttggcccttgtgttttcctatgagtgtgtgtttgccagggacccacctcttggaaagaatatcagtttcaaaccagtactcaattatgcttttcactaactcataagtttaaaatgacagcagagatctgtcaccttttactctagacattgccaacctcaatattttcttctactcttgttgaattatctgtttttttagataatttttttgtttttgctattcaaaatcaaagttttacatacatatagtgaaaatgtaattgtaactctgattcactgctgatgggggtgtaaattaatataatcactttataatacggcagtaactagtattatcgaatgtgtatttaccctttaatgcttcaaatattttcttagatataaacccaacagaaatgtgtatacatctaaaccaagacacatatttagaaatgttcatagtagtgttattcatagcatccccaaacaggaagtggcccatattccatcaacattagaatgaataaataaactgtggtttgttcatacaataaaacaccatgtgcaaaaaccaagaataagatgaaatgaaaatgaaagaattactcctatttacaacttggatgaatctcacagtcatgtttaccaaaatgaactagacacaatagagagtaatgtataattctctttacaaaaaatttaaaacaggcaaatctaatgcatgatgttaaaggttaggatagtagttactttgtgggaggaggatataggtggtgacagagataggcttctgaggtctggtgatgttctatttcttgatctgagtgaaacttataaggtgtgttttccttgtgatctttgggctgtatacttatgatttatcagttttctgtgtgtgtgtgtgtgtgtatatatatatatgtgcatacacacaagaatattcactaaattgtgcatcctttaaggttctttggctactctgtagatcaagtaaattatgagaagggagtgggaatgaacacccaaacatggagcctgtggaggtttctcaggtgagatctgaacccagaccagggaggagaagtgaaatgggagagggtgaaagcactgattttgaaggtagaactaacaggcctcattggagaagaagtaatgagggaaatggaggaatgaaagctgacacgtagggtttgaggttgactgactgtgtgaacacagaatgatcagatttggggatgggagtccacaggtaggttttggggcataggaaatctgagatgtcaaagttgtcagcatgatatatcaatttgaagcttgaaaatagctagaactataaatttagaacttgtcagtatatagatggtatttatagccattaaattggaatgcctcataagtctgttctcaacccttccttattcaacattttatcagtcaccaggaatagaggtgtaaacaaacccacagattaacagtgaagtaatacacagaaaacagtgtaaaaggaaactcaaagcatgataaaatagagtaggtataattagttgccttaggttcaaataatcaattgtttcatactagcagtgtgacctaaccaaaatacaaaagactataaaagacataaagatttaatttcaaatgagatgcatttgattcaacaataagatacagcagtctagagagcaatacaaaaaaggtaatatagttttctcattttatcctgtgctcttccaaccccagaccaagtgtcacaagatatgggaacagcttcagagaaaaagaaaattacaagaaatatttggaaacagtgacacgtgaaaaacaactgaaagaaatggagctgcttagctagaaaagagataaagtggggagagggactggtgtttaaaatctaccttcaaatacttcaagggtgacatttaacacctttttcttaaaaaactacaaaaggcagaattaagacgagatgataggtagatagatagatagataatcagaaaaataaatcctgacacagaataacacagaattttctaagaattatatttgagttgcctaataaggtaattctccattgccaaaatattccagcaaagcctgtatggccactgtgaagattcatggatgagtggatcgttggtctagagcctctaagttcttcccaactctgagatgttatgaatggacaagcaattattttgaaaaggaaaaaaaaaagaatgtaagaaacagagaggaaggagcaggagaaaagggaaggaaagggaaacatttatattatcaaacactttccctggcagaaaaagacaaactaacaagtaaacactgaataaatttaggggaaaataagatttgcgacaggagtgtggtcttctaaagcaggttttaatatcctaaaacatctccctatgcctaaaagaaatttcctggattttattcttttcctaaagaacagcccagctgtggtaaataatcagcattctacagttttaagtaatttaaacctatcagtcagtcatttgacacctctcatttcttgtgttatatcattttttcaacaacatgacttgcaatacacacatggtgaaattggagaggattttacaaaatgataatataataactctatttttgccccaaacatttagctatttgtgctctactccttcagaaaatactttgctttcatagtaaaagtcttcagaaccaagtaatttgagtagcatgccctttatagcaacattctgcaaattctactatttccaaataaagtagtgtgcagtttttcaggaccacaatgttttactatctaagtttatttctggtaacctatttatccaagagattccaatgactgcaatactttttaaaaggtaaaaaggcataccttttagtactatgtgtaattatatgaacgtatatcgatggacaataagtaacaagcagaattttacgtatattcactattatgaagtgggggggactccctctgtctatctggcacataattgttatcatttccaaaaagtgaaatggtaacataaagatgttatagaaaatagtgcatatttcagtaaaatgtttctttcaaggtcagcatgatgagaatattccgaatgctttgaaggattctactcttcctcctctttttttaaagaaaatgcaaacatgtactaaagttgcttttgaaataagacatttatccatttagtaattgcttaactagagaagaattacttcattcagacactcaagaatgtcaacagtcttatttataatgtatttaatagagtaccttctttattaactacctgtagatccaaacttcaggctgttctaaacaagaaactaagaacttaataagcagttagcagacactgagggtctcattgtgcttcagtggcccaaaaagagtagatacagacatctaaattgcctattttatgcctttatgtattgtagaaatctgccttactgttttgtgtagccacagaacagaaatagactaacttttttttagtaaactctctggaaacaaaaatcttcccagatatttattgttaggaaaatataatctaaaaattcttctgcccaaccccttggctgcatcccagtcttccatctgctttgtgcagttggattccctttgctctttactcataaatgattctctcaagcattaaaagtcacctgatagacaccaaagccataatttgcaagatccaggtggaaggcattttgtacttttgttcttacttttatactggaaatatgcaataaggctaaaattcgttttttaaaaaaagacttcccattttttttctcttggctaatgtagtagattagctatgttattttcaaaaatttgcattaactctaaataaaaaacagaataacatttgtaaaaagaaaaaagattagagaacacaaaggcttcaaactgagatacaataaattttttgtccaaaattaaatcccaaatcaagaaaacaacctttagatctgttgttttagcaactaataatctgctgtgcacatttcagttggtatttggaaaacatttaactctgtagctttgtagaaatgatattcccacttgaacatagaggaaattgtacttattgagagtttaactcaagagttagtgcacaacaaaagttcattagtgcccatttcatgttctggaaagataaaatatcagcatcctatagagatgtcttatttgtatatacagcatttcagaaatcaatgggatactcaaaagattaaacaggaacatcctttacttatggaacacaggataaaataaatctaaaattaattgtcatacatcgtttttgaatgagaaccaaatgacctatcctaccacctctaattgtgaatacaggtttttcaagagtgtaccttcttcctcatttatttctaattgccaggcattgccaaacaaaagttaattctggaaattcttgtaaatgaagagaggtttttgatcagagaaggtgttgtttgaaacagccagaagatccagcttgcaacaattacggacaagctactgtgtcttaatatcaagctaaaaattccctggtccactgatgcaagacttattttactcaaattgtgaacaaaaagacaagtggtaaattaggagggaaaaaagtgaagcaacttttattaaataccatgcaaccatctggcaccactccgcaaagttgattattgactaactttaatagcagacatttttgtctattcctttaaacattttgtggaggaaatgtcctctgtattggggggggtggggggacagttggaggtggggggcagatagtggttgagtgtgagttggagggtagaaggaggaaattaaaagatgcattgataaagcagtagggtacaggagttatgcaagcaatagtttatgtaaagccacagagagagtggcttatgccagaaacagcaggtccttccaaatttctcaagctttgtccttgctaacagtaagcaagcctaggaggggatgcttgaagaacctggtaagcaactgcccggctctcccactaacaagtccatggatttctcagttaaggttacttaaaattgcaaaagctattcacttgctgaagattgtcaaaaatcactgaattttatagctttaagagagaatcttacagatcaagaagtcccaagcctgtatttttccagatataatcatttaaacaatcctaacctttgtgaggaaagtataggaggccaggcaaggtagacagagcttgaggccttggcagttgcttccttttgatctctaggggaagggggtgggggttaatatgtattcattaattaataccaacattgtattgaaaaaattgcaattagtcaatgataatgggttcttctgaacattttacatgacaaacaaatattcttaagtttaatttcaaaaagacgtggagtttctttctatttttttttttaagatgggccttgctctgtgccctcaaactccagtctacaatctcaaactcctgggctcaagaaatcctcttgtagtagctaggactacaggcatctctcactacacctggctagttttttttttattttttgtagagactgggtctcactatgtctccctcctcagccacccagagagctgggattataggtgtaagccactgtgccaggcctagccctggagtttctaatacattggtgatacaactctgagatttctaagcatggatttgtaaatgaagagctggagcttaatttttctaattcacacagcactgtttcaacattgtcttattcagtggttctcagcctgggaaagaaggagaaaggtgattttgccccccagaggacatttggcaacatttggaaacattttggttgtcatgactgggagtgttataggtatctagtggatagatgccaaggatgttgctaaacatcctacaatgcactggacagtctctcaaggaaaaatgatctggcccaaaatgccaacagggttgagattgagaaactctggtctaatctgaacactctgaatattattaaaacatatggtgagatcaagaatttattactgcattttcgttaataccaatttgctcaaaggcagtttgaaaaacagaccctgactaaaattgcatgtgcgttatacagggaaaaaaatatgacacatttgtgatttgaaaaggaaaaaaagctgaagggaaaaaattagatatttttattcataagagcattgccatacaattttcaatgctccagaaaaataaccttcttccattgacactgtgctgaaagaagtgagtaacaaaatggttataaactatccttctcacaaattctaatctattatcagactgttatttctaaaatatattaatacaccatctaaaaaacagccctcttatcagaagctatgatacataataagtcagaagataaatgcaccagtaggaatttattataatttttttaatttctctggattacagggcacgtaaactctgtaggaggtgcttattggagagtaattctgtgatccagaagacactagaatgtgttcagccatttagcacccacccaccccctttcttttccctttcctggtaaattttcctttatgttcataaggacagatgccattgctgtgggaatcactctggtttaagcctcttgagaaaaacagtagctaactatattagtccgttctcacactgctataaagaaatacctgagactgggtaatctataaagaaaagaggtttagttggctcacagttccactagctgtacaggaagcattatgatggcatctgctcagcttctggggaggcctcaggaaacttacaatcatggcggaaggtaaacagggagtatcacctcacgtggccacagaaggagccaaagaaaggtgagggggaggtgccacacacttttgaaggacgagatctaatgagaactcactcactatacagtaccaactgcggggtcggggggcaggggtggcagtgggggtggttgctaaaccattcctaagaactctgcccccatgatctaatctctacctcccaccaagccccacctccaacactggggattacagttccacatgagattcgggcagggacacaaatccaagccatatcactaaccttatctaaatactggccaataggataagcaaaatcatttttatagcttccttcaaaaaatcttatgtattaaaatgttgaaatgtataagaatttcatcaaaataagaacctcaccagatctgacccaagggagagaagattgttcaataaaaaattacaaatggatgaataaatgaatcctctcctttcaagttctgtgctccatacaacaaatctagatgggtctcatttagatgggatttagagacacctttcttaaatacctatcattttacgaatgaagctgttgtctaaagagtcctcttggccacttcctgaaaacaaatcaattatttgtgataactctcaaatgtcctaataatcccatggaaaatgtaaatgtaatgaggaccaagaattataaggtaagaagtgctaatgtcagatttttacccactacataagcccactcttgtactagggcagtgactttcttctttgggtgagaccttgaaatctgggattataattttgaattataattataaaatggtatttggctgtaaattatctcctttttttttctgttcctcacagttgatattatggattcccataaggattcatgtcttctattcactttaatgaacagttgttgggcaacaattctagaagagttccaattctcatcaggagaatggacaaggtggagaagcagagaaaatgcaatgagtagaatgtctaagtcatcactttggaattgactgaacataaataaaaatgagaaagatacgtaaaaaagaagggaatgggtaagcagggtgatgtctgggagaggaggggctccatagccatgagagtcaactctgtaacaccctatagggttacaacactgcccttcatatactgaggtagcagcagggaaactttttaattattagaaatattgaactttgcctcccacccccaaacatttttctcattcagttcctgttcttttttatttctgtaatttttactgtttcaaaaatgatcttttttctttcggaagaagcaattcttcaaatccagttcacataaggggatttgatatgttcaacaagctccaaatacactgtatccagcaatacctactacatgcctactttgagctctgagcaacctgcacctcaagcctagttctcattgttttgcttttggcaaattttcactaagtgcccttcctccccaaacacacgtatatgtctaccagaccctaaagccctttatgaacatgcaaactcctcccttctgaaaacctttgcgtgagtggtcagcaggctaattcatccattgcaatgtggctttgtgttagggttctgtttccgtgctgcctgcaagataatcacagatgtgactgcatcttagaagttcctgaatctttcaagacagtctggttcacaagaaaattaaaaggtggaggtcgggcgcggtggctcacgcctgcaatcccagcactttgggaggccgaggcgggcggatcacctgaggttgggagttcgaaaccagcctgaccaacatggggaaaccccgtctctgctaaaaatacaaaattagccaggcgtggtggtgcatgcctgtaatcccagctactcgggaggctgaggcaggagaatcgcttgaacccgggaggcagaggttgcgatgagccgagatcgtgccattgcactccagcctgggcaacaagagcgaaactctgccacacacacacaaacacacacacacacacacacacggtgtagtttaggaagtaaaaaaaaaaaaaaaaaaaaaatcagatctcccctcacacctcagatctgaaggcacaaactctagggccagggcgttcgcctacccaactccacatgcacttgcaggtcacctagcactcaggtacctagcactcaggtacattgtggctccttacctctcacgacagcagcaacaacgttgattggaagtttatcactgtgtgttacgggccatgggccatgtgtgttagaattttatgtgaaattaacatttaattctcacggacacccctgaaacagatgccacagcccccattttgccaacgaggcagctgaggttcccagaggctcaataccagcaccatgagccgcagcacgcaaggcaaacacagccggaggtgagcacatacctgcttcgcaccccatgcgcctaaccacaaggttccctccctccaggaaggccgttgtcttccctgggacgacttgccagctctgaggcatgacagtacgggcccccagaagggtgaccaggaggccctcctcgtcccagctgccggcgtcgccgcccactgcagggcccgggctgtgactcgtggggacggttccctgcgccccggcgggggaggtgggcggggaggggcggcggggcgccggggcggggctcgggacggccgggctgggagctggagcccacagcgggaagcggccgccgcccgggcctcgcagggctaggcgaggcgagggggggcggggccgggcgctacgggaaggggaggccgcgcggaccgggagccgcaccgcgccagccgggctgcagcggccgcgcaccaaggctgcgatggggctggagacggagaaggcggacgtacagctcttcatggacgacgactcctacagccaccacagcggcctcgagtacgccgaccccgagaagttcgcggactcggaccaggaccgggatccccaccggctcaactcgcatctcaaggtgaagcccggggcgggcgggcccaagtccccgctgaggccgggaggtgcgggcgcccctcagccccgccctaacccgtcccaccattgctaccgggtcggccccgcagggtctgagacccgcacccttccccggtcccacccgtcaccaggccgcccgcgtagccaggaattcttagccaggttcctgtgcgcccaccgtgaccctaagagaagaggcggacgccctggcacgtccttccctcctgcttcccccgcccaaagcgctcccggttcccggggcgtcaggttggctgacagttcggggtccctgcgtcctgtctcctcagctgggcttcgaggatgtgatcgcagagccggtgactacgcactcctttgacaaagtgtggatctgcagccatgccctctttgaaatcagcaaatacgtaatgtacaagttcctgacggtgttcctggccattcccctggccttcattgcgggaattctctttgccaccctcagctgtctgcacatctggtgagacggggcacaccgggtggaccggctttctgaaacatgggcatattctccgccacctgccccctactctcctcttatcccaggccggcgtcaggaggaggaacgcgcatcagttcccaagcagtaggaagaactggaaggccttgaaaggcaatgcgcttcctttagaataacagtttgggcttggagtttcaacaggagaaagaatgtcggtctttcctggggtgtgattttccttgcatacataaggctgggctgagtgtggaggcgggtacctggaagccacacttcttaccacaggctgctctcggggccctgttgtgactcgtacctgcggttctgggcaggactcttctttctttcattgccttttattcagtcactgcctgtgcttggggtaaaacaaaagtgatctctgagcagaatgccgctgacagtagaattggatgaggatgtcagacctggttaagcagtagtgtggaggggctgcttcaactttgcccctggcagatggcaaggatgggacccagaggaaagggaggtgtgtgcagttaaggcgagggtcccccccagtacaaacgaatgaaaactccagctgcgggataatgaatgagaaggcctccaaattactttttcactgatgaaacacaaatggaagtggcatataattaaaggggaaagaaatatggaagcccactgtatattgataggatattttgagtaactctattcatactcaaaatgtgtcctaaactgtagagaactttcttaagcatcttttaaattttttatggaaaatgtcatattttaccaataaatgttgttgtgttagaaaatatccactttaatctgagaggaagaatattcagatcatccccagtatcacaacagttgtcacgctagtgcttcaggttagtcctggtgaaaggtataacccaaggtacctccgtgtctttcttacaccttttatgatattgccacaccctgataaatactcggtgttcattgttagaagttaccaatttatcctttatttctctataccacctgaatcttaatttatttagtcagttagctagctagttagttcaacaaactttaaattgattgagtgcttagtttgtgctgggcactgggccaggatgaatgagagatagggtctgccttcagcttactcacagccttatcagggcagctggctaggtacagagatggacgctgagaaaacacagtcaactgacaaagagggaggaacagacaaggctttgaagagtgaaaggagtcgaaaaagactttgaaaggataaatgaaaattcaccaaatacgtaaaggatacacaaagaacaccaatttaattttatcactaaaggttgtaaacaattaaactatgttgaaggtgccaagattgccagggaaatgaaaatgttgccttagtacatgatcagcttcatgaaggtcaaatggatagttatattctgacatttgcacttgaattttttttaagatccctgagttggcacataagatttgggattcccaattaactaaaactaatcatctaacctctatgtcagttttctcactttcaaaactgtgaaaaactgagtgaccgcatagcatattgtgaaatgctgactatgaagctatttggaaatgtgaagtaccatatttatagtcaacaaagctaggcttcccaaagcttttgtgaaagaatttgaaaaaaaaaagtttctcatttactaagtggtggaaagatataagtaaaactacaattaaccaagcaatgcctctctccagctggctcttctgagaatgggaggtgtttttgtatagtgcttcaattggtgaatcatcaatgcacctttttttagccacataaaatgtattatttaatattatttaacttcagcttgtttttttaactatatttatgtggggcattaatatttaactgtaaaacatttgtcaccaggcagctgtgattgcaagtagaggagtaatttcaaacaagaatgcttaaaagttagctatgccttgataaaataggtttatcattaatagattgcattcccatgacatgataagaccagatcaaggacagaccttacagaattgcaaacccatttgggcaagctttttttgttttgttttctttttatatatattttttaaagcaggggcttgtgtattgtttttaccaaaaagttagtggtgaccaaagctaggaaaatatgcagtagtggaactttgaaccatgtcacaatattaaaacaggtcagattttagatcctttaaacaaacaatcaacaacaataaaacacagaagtctggtggtgttggatcctagaccagaagtacgggccattaggaatcagtgaattagttggattccatactacagtcagacagagatagctgctgtttgttaagcacaggttattggtcataagtggatcataaccaaagaaatgtggctggagcacccatatcccttatttttgctggaatgcaaagcaaacaaatgcccaactgatggaaatgcgatagtagcaatctcatttctagaagacagttttcatacagtaaattgctatgaatgcagtctgcatgactctacaattactacaacactaaataaaagtctctatcctatggccttattatccaaggatatatattatccaaggaatatataaccttacatatattaatatatataatatatatatattataagatttacttaagaagtattggccacattcagcctcaaccaaattttgggtcaatcagaactgcctggagtttcagaagctaaactatttgtgatgttgagaacccaacttaagtttgatgtcggaggatcattagattctctgctccaaaatgagggaacacaagtaaacaaaaataaaatccaaatgagttaacaacaccctataaactgaactcctcgaatgtgggtaactgctttgctgaacaagaagattcacttttgacatgtgctaaattcccttttaggacatggagatctaaggagtcacggagatagaaaatttgttagcctaaggaagaatagaaagtacattgtattctggctgggagcagtggctctcgcctgtaatcccagcactttgggaggccaagctgggcagatcacttgaggtcaggagttcaagaacagcctggccaacatggtgaaactctgtctctactaaaaatacaaaaattagccaagcatagtagcaagtgcccatgatcccagctactcagggaggctgaggcaggagaatcactcgaacccgggaggcgaaggttgcagtgagccgagatcacttcactgctctccagcctgggcaatagagtgagaacctgaaaagaaagaaggaagggaagggaagaggaggggaggggagaagaaagagagaaagaaagagagggagggagggagggagggagggaggaaggaaggaagggagggagggagggagggaggaagacagaaagaaaaagagaaagaaggaaagaaagaaagaaaagaagaaagaaaaaagaaaagaaaggaaagaaagaaagaaagagaaagaaaaagaaagaaagagaaagaaagaaagaaggaaggaattctaagtgaagtggatttggttaggaaactttctgatctaaacttcagccttttaataggccaatttgaggtcatcttgttatagttattttcattatatattctgccttcaaaataggtctatttattatacattataatgacagcatcatacaggcatttcaggggtacataataaatgtcaatcctcatagccagttctgagagatctcctggtgtcactttaatttgtagcaacatgcccaagaccacatatcaagtgagaaatataatagaataataagtctaaagttgccatcattgaggtttctattcagctatttatctctgaaacacttagtaattaattttcttattatataaaagtgtttcatgtatttagcacttgaaataaaacacaatttgtggagacagtcaatgtgaataattctatattctaaaaatatatcaatcaatcagaaagctgcctaatatttccttcattttgggctaagtacagcagaccctcatttaagtcatattttaatagcaaaccaagaaaatcagcctactcccttatgcccacccaggtaataataaagcttccattgaggctaccagcagtgcctgaaaatctcacaactacttttgtgctcagaggacattactacaacagagaacattatttagaaaattacatataaaattaaccatcctgaggactataaggatatgcagctatgttaggaacaagtgtatgaaaaataacaatttcaggatagactagttttcttgtgtaaaagttctaacatcatttgcagggttctttcaactataccatacagcccttttcagtgtgtgtgattactgtgaaaaaattaaaaaatataaaacatagttaataacataaggcataaaagaatgataaatttatgttagctcaaccatttactaagggtcaaggatgtcctcactgtttaaaaaaacttaaacgctagtaggaaagacagaaatacagcatctatttataataccttttgatacatgtgaaaattaagaagtttgtttcagtactttagaaatacaatgagggaatatccgatctagcctggtccaggaaaagggaagaagactgaggcagcaggaaaggctatcaggaagtaaaccctcagggaagtgtgaagacttaagcaggttaatgttaactggcagagaccaggtagataaagacatggttttatttatttttgttttactgtttcagatagcatgccaccagtagaaagaatattagtgtttattatctacatgactatatttttaggcaacatattttttgtgcatcttatcactttagtccatttgcattactatgaaggaatacctgagactaggttatttataaagaaaagaggtttatttttgctcacagttctgcgggctgtacaggaagcacagtgccagcatctactttaggcaaggacctcaggaagcttccacttatagtggaaggagaaggaggagcaggcacgtcacatggcaagaaagggagcaagagagagaatgtggaggtcccagactcttttagttaatcagatctcaagcaaactaactgagtgagaactcacgttaccaagagggtggcaggcactaagacattcatgagggatctacccgctgtgatccaattatccccactcggccccacctccaacactggggactacatttcaaaatgagagtcagggggacaaaaaacccaaatcattatcagtgatcattgttcatttatttgtttcaaactctcaaccaaatttaagtaaatgggtcagtattttatcttttcatacatgtacaagacagaccttatttggtaacagcaacaatcctcacacatctctcttccttccttccaggattttaatgccttttgtaaagacctgcctaatggttctgccttcagtgcagacaatatggaagagtgtgacagatgttatcattgctccattgtgtacgagcgtaggacgatgcttctcttctgtcagcctgcaactgagccaggattgaatacttggaccccaggtctggagattgggatactgtaatacttctttgttattataacataaaagcaccactgttctgttcatttcctagctgttctaattaagaaaactattaagatgagcaaccacatttagaaatgtttattgacaggtcttttcaaataatgcttttctaattaatagccaaagatttcatatctaactttgtaaccagaattatacagtaagttgacaccacttagatttaaaggcagacagttttgctttagtacaatagtatacattttataatgatgaacttataatgattaagggacatttctataaaaatactacaatagttttatgcacaacttcccattaaaaatgagatttcttatttgtttgtctgtttttactctgggagtaatactttttaaattacctttacatatatagtcactggcatactgagaatatacaatgatcctggaaattgcagtaacaaaagcacacaacgattatagtaactataagatacaataaaacaaataaatatgaaagtagattcatgaaaatgtattcctttaaaatattgttttcctacaggcctatttaacaagatgtttcattttactgtatattttgtagttaatataaatgttgctctaatcagattgcttaaaagcatttttattatatttatgttgttgaactaatatatgaaataagtaaatgtagctcccacaaggtaaacttcattggtaagattgcactgttctgattatgtaagcatttgtacatcttctttggaaataaaagataaaagagcgatacacaaagctttcttttctaacttttccaagcaaaatctaaaatgttttatgacatttttctggctgtgatcttaaaataattcatatctaaatagtattttgtctaggagatgctttctctctagtagttagaaattaaatctgtgtcagcattcctattaatgtctcactttactttcaagtaatattggtgctatttaacattttacagtaaatgttacttctgatactttagtacaatttcaactacagtgattcatgtagagagacaggggagttgtcaacttgggctactgaactacatgcataaactaaaaactaacagctacaaacttttaagatttctctaatattggtatgtaacacaggataaagttattcttgtcattttgaactgtagagtcctatttcagtgtgatgaatcactgttgctttgaaaaatctcattatttctgggccgggcatggtggctcacccctgtaatcccagcactttgggaggccaaggcgggtggatcatgaggtcaggagatcaagaccatcctggccaacatggtgataccccgtctctactaaaaatacaaaaaaattagttgggcatggtggcatgcacctgtagtcccagctacctgggaggctgaggcaggagaattgcttgaacctgggaggcagaggttgcagtgagccaaaatcatgccactgcactcccgcctggcaacagagcaagagtctgtctcaaaaaaaaaaagaaaaaaagaaaaaaagaaaaaagaaaaatctcattatttcaaaatgatagacatataccaaaaacaagtctataatgtgagtagttactaaaatttacacatcttaaaagtgtgtaaatgcttaaatttcagaattaccatcagaacctcaattgacattcctttgaatacgctaataagtgacaaataagattaataagatttttcaaaatcgccaggactggtgaatataaatgatgattgaactggaataatattggggaccaaatcaaatgaatgattaaattatgaagctcatatccttttgaaggtagttgcaaagagacatttcaaaactgccctaggccattgcagcatccttagatgggacgcataatcattaccttaaagcatcaccactcattttgaccatatagattttattatgttagtttaaaaggtcaatcagcctcatgactttatagttatgtcttgtatttaaaaacattttttatacatttggttatgttgataaaccaaaaacatttgattaataaaatatctatttgaataaattatgagctatcctttcaaacagctattggcaagttttaaacccaaaatatatacacatagttctgtaataaaactgtttgacttctcaagtaacatgacttccttatttctgaacagtactggttactttcaaaatgaatttttattgagattttccattaactatttttttcaaagactcaaattttgtaccaagtaaatccaggctttatgtacaaacatgttgtttgttttatttggggctgggggaggtatatgatgagcagacttctcggaattcataataaattttctaaaagccta

SEQ ID NO: 197 - DNA, 2446 bp, Homo sapiens
gcccaccgcccgcccgccagccgagaagccgggctggcgcgctcggtttctccgcgaaagccggccgtgtacctaggaattaaccggcccgcgcgggagggaaggggaggggagcgggaagcgggaagcggggcgggggggggatgctgagcgcgcgcgagaacaataataagatcgtgtttgcggtcgctgcccgagaaggaattcggagcagacgcgaggcccggcgctcgcgccgcgcccgggagcccgggagggagaccggcagcggcggcatgaggcaggcgacgcggcgctggtgagcagcgcgcgcggcggcggcggcggcggcggcggggaccttggcgcggccggacgcgggcgagcgccgaacggccgggggctcccctcccccgctgccgggccgtgatttgccgggcctgctgcgccccccgcccaccccttgcctcagccgccgcctcgccgcttcccctcgtcggagcggccgctcgtccgcccggcttgaggcccgcggggagcgcggcgcaattcgtcggcccgcgggggggcggcctcccggcatcttcgcggcgaccaaggactaccaggaaggggagcggctgggatggcgcgtccgcggccccgcgagtacaaagcgggcgacctggtcttcgccaagatgaagggctacccgcactggccggcccggattgatgaactcccagagggcgctgtgaagcctccagcaaacaagtatcctatcttcttttttggcacccatgaaactgcatttctaggtcccaaagacctttttccatataaggagtacaaagacaagtttggaaagtcaaacaaacggaaaggatttaacgaaggattgtgggaaatagaaaataacccaggagtaaagtttactggctaccaggcaattcagcaacagagctcttcagaaactgagggagaaggtggaaatactgcagatgcaagcagtgaggaagaaggtgatagagtagaagaagatggaaaaggcaaaagaaagaatgaaaaagcaggctcaaaacggaaaaagtcatatacttcaaagaaatcctctaaacagtcccggaaatctccaggagatgaagatgacaaagactgcaaagaagaggaaaacaaaagcagctctgagggtggagatgcgggcaacgacacaagaaacacaacttcagacttgcagaaaaccagtgaagggacctaactaccataatgaatgctgcatattaagagaaaccacaagaaggttatatgtttggttgtctaatattcttggatttgatatgaaccaacacatagtccttgttgtcattgacagaaccccagtttgtatgtacattattcatattcctctctgttgtgtttcggggggaaaagacattttagccttttttaaaagttactgatttaatttcatgttatttggttgcatgaagttgcccttaaccactaaggattatcaagatttttgcgcagacttatacatgtctaggatccttttatcaaggcagttatgatcatcgttttcctgccttgaccccaccatcatcaaacactcagttaaatataaattaacattttttagatgaccactcaacataatgcttaagaatggaatttcctctctgtgacagaacccaggaattaattcctaaatacataacgttggtatattgaagacgaaattaaaattgtccttcagttttgaggccatgtgtaaagtttaaccatattgtaaaatatctattccgtattagaaatagctagttgacagcttatacttctcaaaattcatattgttatgtacacaaactaagtttctatatgtgaagttagtgagtctttttgtgttactccaaaataaaggcaatgatttatttttttcccagtgccaatacaattttgagctaagcactcaaggtggatactttacattttaaagctggaatcagcaacagccctatgggaaaccagacaaagcattgacttttaaatgtagacttttaaaataaactgttttcttttggaactacaattagaatagttaatattcatccttaaaccattattatgtgtacattattgttgctattgtgataatagagaattttatttatttttatgccagcttatattgtgagaacacatttagtcagtttgggttttatcaatcctgttaatgcttgtccttggaacatctttcgcgtattcacggtttgtagttgaaaagtttactgtaaaaaaatcaaaaacaaaaaaatgtattgtttttacagaataaatttattggaatgtgtactgggagtaagatttgaggttgtaagcaaactaagttagtgtaatttggcttcatatatgtaacgtgaggtattaatgtaattcatatattaaagcaaaaattgttcacagcaagctgacaataaaaaaaaaaaaa

SEQ ID NO: 198 - DNA, 7753 bp, Homo sapiens
gccaggagttgtgagtttccaagccccagctcactctgaccacttctctgcctgcccagcatcatgaagggccttgcagctgccctccttgtcctcgtctgcaccatggccctctgctcctgtgcacaaggtgagtctgtcatccatgtgctttgatggctccctgggcagaagtcaggcgacatcttccaagtgctgtggcctgaaaaccctcgtgtgaaattagggatcctcaaatggggtttcaaagtgacatcattgttttcttcaagaaggttgaaaagcagtctattgatctgggcagcaggatgggagtcagagaagttttatcctactgagataaatgagatggttgaagtctaattcattgggttattagcgtgaggtagaatctaggtctatttagttctcactggtgctggtaagttttacaatgacctcagcagtctcctagagttcaaccccttgggtaacataaaagatgtctatacttttctcagctatcttgtgatttaatctattagaaaaaaaattccccaaggagagttaggagaagggcatagactattcagggagcttgattccctgtagcgtaaaataaagactaaaatggagagacaagactagggaaattaaggagaaacaaacaaaaagccagattatttccagctttcttttcctgcaggcctcaactctgagctatgctgtctccctttgctcctttgtgacccgcctgggcttcttctcctgagcaactcctgttgtctttgttccctcagataagattcacaccccatgcatctgctgcttctcctacacctcccagtagatgcactgcaaattttcggttgcctattataaaaccagtggtgagcggtcttaaaattaaaatcttatgatatattttaattactttatacagtcaatattcatttagttttcatcacatatttgctcttcctgtcctcttaaattcttctgcatctctgagctccatctgcaatcacttttcttctgcctaaaggaatcctcttagtattttcattactgtgggtcttctgatagtgaagtctccattttttgcttgcttggaaatgtcttcattttaccttcattttaccttcacactggatatgaaagtccatagtagctcccacctcctacttgtgcttacgtgctccttgtcccttgtcccatgggttgtctcctccatatgccctatttgcagacagaaggactggtgctgacattacgccagggtaagagcaccagctgctggagtcagcaaatttgcagtggatatggagaaacataagagaggcaggagacaatggggtgccttaaccgtgagggaaccagcatccagaacctgagaaaaaccaagtaaatttcttccactcttgaaaagggaccagcaagaagttgatgaagacctcactgctcaggactgtgaagtagggcacaaaaggaactaaggaagtcaggcattcatccttgactttgagtgtttcttttaaatctctgcctctgtcttactctcactcccttgctccctcttcagggagtatagctcttggaatggctggcctttgttccatctcttttgggtaggaacttcattcagtctacagagacttttcccagcaagagaccatcatctctaaatcgctgtaggagtagagcttctcaggagaactgaaggaactctgccacttcctcaccctaggaaccaactagacccagagtttgcatcttgtgaatgactgagttaggccccagttttcccaactaacaatgggtcctagccctctcctgcctttcagatctaggttagatatctaagtcctcagaaaatagcccagaacattttgaaaccttttgtgaagttctttgattttacttagagaatcttaatccacaagaattaagtgatatggcttaaatgtctgtccagagcatagggaaacaactctaaaatgaagaaaggacaagggtcaagagagtctcacgggacagatgagacttgtgagctgagggccatggagaggagatggagggcaccaaagaagacctgttcagtgttgggcaggcagaggagtgtaggcaatgccaaaacaggactgggcactcactgccacctacatcgttctggggtccaagccatgtcctcaaccctttacaggcaactctaaaccatgaggagctggagactggggatgaccagaggggaagatgttaagtgcatggtgtcttgctctgagttgtacatgttggggtaccttgggtcccccaggggttcaggatgtacaagagcaactcaactgctcacttgttggggctgaatgtgcagaaatgtttttgacagtgagagagggtgagatgttagtgttgaagtcatacgtacaaggagagatcttcagattaacacttccaccacagagcagctctctaatgctgtgctgcagctcctctgaccacatggtgtgatgtaaatggtcatgccacagcgttctgggcagcacaagtcacatttaaaccacaccctgggtgaaaaggaccattacatcgtgttaatcggagtgcttctaagaaatgcttaactcatgaggaggacgtcaagaattggtgttaccaagaagccaagcttagctggtaccttctatcaagaacagatctatttgtgaatggcaccatggtcatttcctcctatggaacagatatttctagtgttgtgtttccattgcacagaagtgacatgtaagatgataccccagaatcttaagtagttcgagttgtgtttgatccagacccaaatggacagaatggaatagggaaagtctggactatgggaatgacaagaatgatggggccaggcttttaactgctgtttgattcattgaacattcatagctccctacaatatgccatcattgggtttgactctgggtaatagacatgaatatgcatgacatatggggtgtctatatagatcaggagccttagatgcccttattttttcacccaggaagcccacagctaggaaaatatcctacagaaataacctcacttatggagaaagttttttgcatacagatgtttggcacaacttataacaatgaaaaattggccaggtgcagtggcttacacctgtaatcctagcactttgggaggccgaggcaagcagatcacctgaggtcaggagttcgagaccagcctggccaacatggtgaaacctcatcttcactaaaaatacaaaaattagctgggcatagtggtgcacgcctgtagttccagctactcaggaggctgaggtaggagaatcgcttgaacctgggaagtgggggttgcattgacctgggatcacaccactgtactccatcctgggcaacagagtgagactccatctaaaaaaaaaggaaaaattgaaaccaacccacatatgttacagtagtgcatgacaatattaatgcactaggcttaagtaaattaggcagttcttaaaaatactggaatgatttggaaaagtcttttaatattaagcacagtcatatgctgcataacaatgctttggtcaatgacaaactgcatatattatacagcggtggtcccataagattataattctgtatttgtactataccttttctatgtttagatatgtttagatatgcaaatacttaacattgcattgcagttgcctacagtattcagtacagtggcatgctgtacaactttgtagcctaggagctacaggctgtaccatacagtgaaggtgtacggtagactacaccatctaggtttgtgtaagtctatgatattcccacaataacaaaacagactaatgacaagttcctcagatgtatttttgtcattaagtgatgcatggctgtataaataaaaaaatacaaaattaaaacctgtatcatgacaacagtaatgtcttcccccaccagacacagtaagaagaaggaaaaaagcaaatgagcaaacagtactatcataagcctagaaaaaaactgcactggaaagaaatataccaaactgttttttaaaaaaaaaaagtggctaggtttgggtactagaatttttcctaccttcaatgaaatttttttttcaggttttgcatcagaatgcacatatgccacaatagggaatgtagaaaaaaactctcacattcctgcctccgtttgcctgctgcctacccagctttgagattctaaatgagtttttattcttttctgtattttatgtgttttcaaaattagctttactgctttttggtgtaatctatagttcacataacaaatcatataaaaagctatttgaactaaaaacactagtaacattgctcttcctgtactcctatgagactccctcgtatgcttgtggatgagacattatgaggatgtgatgactgagaaagcagcggccattttgggaccacgaggtgacaagctcaaataagaaaagccaacaaaatggtgggggaaggggagatgttttaagaagcctgagttcttgatgacacaactgagctgttaaacaaactcagggaggaccacctgtttaaatttatttatttacctaattatttatttgagacaaagtcttactctgttgcccaggctggagtgcagtggcatgatcagagctcactgtaggcttgactttccgggctgaagcaatcctcctgcctcagcgtccaaagaagctgaaactacaggcatgcccagctactttaaaaaaaaaaaaatttatagagacagggtctcactatgttgctcaggttggtctcacactcttggcttcaagcaatcctcccaccttggcctctccaaatgctgggattacaggcatgagccaccatgcctggctctgatgtccatggtacatctatgctgttggaacagctggggaggctatcagaaggttctgctcaatgggagaaaggctttatctaaagacctgcccttgtgagaaggcaccagctaacccagtctcagggtgacaccagcatctcacctcctctcactgtggaaaccatttccccaccaagggatcaactgaagcattcttgcaaatagcctgaatctttgtggtgagctgaagctctcctggtttgtgcaatgcacagcatgacaccaatatcatgattaaaaaattttccccttcagagaggatcaggaaaaactaatgggtactaggcttaatatctgggtgatgaaataatctgtataacaaactcccatgacatgagtttacctatgtaacaagtctgcacatgtaccccgaacttaaaagtttaaaaaatgaaaaaagaaacaaaattcctcctcagtctccccaagtttatatcttctaataccccaaggctgcctgtaaagagaagagatggctgagaccccagaaggaggcagcggctacaagtcctgagttcagctcttcccggcagccatgggagctcacactctgcccagcatcctggggacccctgcagttgcccttgctgtccttttcttcactgaggccctctgcccccaggcccgctgtcccttgtgtgaatttgtcttttgctcttgtgcccctactgtctggccatggcttggaccccactgcccaagtctatctctaagacctccaaatacagaacatcagagggatttcagggactatttcccgaggaggatttttcttcctaagaggtttcagcaactctgttctccacctctgggagacagagggagagtgagtcccattctatggatgagaaaatggaggcccacggggattttgacaagaggtaggatctgggtccaattggttctcagtggtgtggccttggctgtccttatgaattcagatggaactccccaaggagagatgggatgggaaatagtttgctcagaaaactaaatttccagtaaagagacatagagacccagaaccaagacagccagagaatgagaaataccaagagaaagatgcagaaattaaaatgtcagggaaaagaagaaatgccagcttccttctggatctctttgtccctatatccccaccccaagcggtgatatctcccagttcttcctgactctcaaggaaagggaccaggagcagctggcttgccttgtgaacaatgacttgggatctttctgtcctgtctcttgcagttggtaccaacaaagagctctgctgcctcgtctatacctcctggcagattccacaaaagttcatagttgactattctgaaaccagcccccagtgccccaagccaggtgtcatgtaagtgccagtgctcctgcccacccctcgggagggaggatgggaggtttggggtgaggtcccctcagagtactcagctctctaaggcccatcaaggtaaaggactccaggggaggcccctgcagtgttttgtgacctggcctggggcctgcagagtcctgaagggcctgcccctgggcagagggaagagagcagacatgacaacaggaagtttgcttcctgaggaaccccatctgagacatttggggaaggcctgtgaaccccgaagttaaggggaaattttacgggcacgaggacaggccctgagatgcctgggacagagaaggacgcaggggccacaggattcccctgatgaattcgtcagttcttaactcttcctcccttctccacagcctcctaaccaagagaggccggcagatctgtgctgaccccaataagaagtgggtccagaaatacatcagcgacctgaagctgaatgcctgaggggcctggaagctgcgagggcccagtgaacttggtgggcccaggagggaacaggagcctgagccagggcaatggccctgccaccctggaggccacctcttctaagagtcccatctgctatgcccagccacattaactaactttaatcttagtttatgcatcatatttcattttgaaattgatttctattgttgagctgcattatgaaattagtattttctctgacatctcatgacattgtctttatcatcctttcccctttcccttcaactcttcgtacattcaatgcatggatcaatcagtgtgattagctttctcagcagacattgtgccatatgtatcaaatgacaaatctttattgaatggttttgctcagcaccaccttttaatatattggcagtacttattatataaaaggtaaaccagcattctcactgtgacgactctgttgattttgtttcactaatcggaatcacagactgagaggaattctgggggaggagtagggaaatatgaaaaggggcagaaacagcaagatagggaccaagtacttctacagtcataccagacatttccctggagatactttcctgaaaagttgaaacagacaccattagtttataaaccatattgtaactgaaatgtgatagaaaaattttctacttaaatgaatatcaagatgacgctgcaatgcatatttacgcacacaagctcattttcataaatgaagctttcctcagaatgatggctaacatctgttgaggtcttaccaagtgctgggttttgggctaagtacttatattagtaaaagtctagcaaatactgcccatagtctagcaaggactccttacctggaagttgctgaaagccttggtaatgttatctttgttctccactctgcttttggggaggatgttttccatgactatacgagatgaggcttggggctgggtggccagagttagcaaataaaaatacagaatggatacta

SEQ ID NO: 199 - DNA, 9123 bp, Homo sapiens
gcactcgctggaaagcggctccgagccaggggctattgcaaagccagggtgcgctaccggacggagaggggagagccctgagcagagtgagcaacatcgcagccaaggcggaggccgaagaggggcgccaggcaccaatctccgcgttgcctcagccccggaggcgccccagagcgcttcttgtcccagcagagccactctgcctgcgcctgcctctcagtgtctccaactttgcgctggaagaaaaacttcccgcgcgccggcagaactgcagcgcctccttttagtgactccgggagcttcggctgtagccggctctgcgcgcccttccaacgaataatagaaattgttaattttaacaatccagagcaggccaacgaggctttgctctcccgacccgaactaaaggtccctcgctccgtgcgctgctacgagcggtgtctcctggggctccaatgcagcgagctgtgcccgaggggttcggaaggcgcaagctgggcagcgacatggggaacgcggagcgggctccggggtctcggagctttgggccagtacccacgctgctgctgctcgccgcggcgctactggccgtgtcggacgcactcgggcgcccctccgaggaggacgaggagctagtggtgccggagctggagcgcgccccgggacacgggaccacgcgcctccgcctgcacgcctttgaccagcagctggatctggagctgcggcccgacagcagctttttggcgcccggcttcacgctccagaacgtggggcgcaaatccgggtccgagacgccgcttccggaaaccgacctggcgcactgcttctactccggcaccgtgaatggcgatcccagctcggctgccgccctcagcctctgcgagggcgtgcgcggcgccttctacctgctgggggaggcgtatttcatccagccgctgcccgccgccagcgagcgcctcgccaccgccgccccaggggagaagccgccggcaccactacagttccacctcctgcggcggaatcggcagggcgacgtcggcggcacgtgcggggtcgtggacgacgagccccggccgactgggaaagcggagaccgaagacgaggacgaagggactgagggcgaggacgaaggggctcagtggtcgccgcaggacccggcactgcaaggcgtaggacagcccacaggtagaagaattgctctcgtttgtctgtccattcatcctcctctcctcactttatctatcccacgcgacttcagggtagactcctgctggcaggcaggatcataagtccgcggacagaacggaggcctggagtggaggaatgtggtttgaggtttggattggtgaactcagctagaaaacatacttgcatttgcccgaataatgaataaccaagaaaaaaactgacaaacgattttctgcaaactaaagcaaagcatttaggccggggagggagagtttgtaacctgactccttccacctttagcgagttggagcttgtgcgagttctttccactctgtgtatttctttttaatgattttgtgtgcgccttttgtgcgggttgcaacgttgcgctgagttttgtaaccgctgcctgtgcgtgcatcctgcgctcacgggagggcggatgtggagagggcagaggagcaatggtgacctgggaaggtaccctgagcggctacgctaggatctctgttctgcagacttctgtcccctttcccccttataaggctgacccaggcgggctgaaggcggtggggccccttcgcagaacctgcttgggaggtctttcccgggtttgccccgcctcccagtttgcactccctctcgcggccataattctgctctcaagcactgttgaaagtcactgccggtccttcctgctacggccttctctctgtgcagtgcttattctccagttctttttgtttcatcactttggtgcctttttccttctttaactctctcgcgtgtcattttttaaagaattctccccttttcccctgctcctctgctcctgggagcaaagtggtcgcagcccagtttaggactttctgcaggggttgggtctcagtccggagtggaaggctctgttccaaataatcaatcatgcctggaagctggaacttatttcgctggggcagtgggagtggggccagaggctgctgggcagagtgggtggtccttgtgcccggaattggcaagagcggagcaccccagggacccctggaatgagacagcagagctgtgcagtctgagattccttaaggcccggccccttggcagcagcccaggccctacccgaggccttccacgtggagcctgatgatctcattcaggatttgagccctcgcctgtgaaagagtgactcagggcctctgcctgccgctcttgctccaagattttactacaattgggtaggattatgtgcgaaattgccttgttcagactgtgggatttcaaagagaacagaagaaatcctgctcacacacagaaagatcctgaccatgcaaaggagcgcgtggtctttttatttaaaggagaggagagaactttaaaaataacacttggagtgaagatatgcaaatatttttgttattgttgttctgggtatatttttgctttgtttgctttgactggttaggctttcctaatatatgctaggaaggtaactattcttggacagcctgaccataagcaaacttttttttttctttacaggaactggaagcataagaaagaagcgatttgtgtccagtcaccgctatgtggaaaccatgcttgtggcagaccagtcgatggcagaattccacggcagtggtctaaagcattaccttctcacgttgttttcggtggcagccagattgtacaaacaccccagcattcgtaattcagttagcctggtggtggtgaagatcttggtcatccacgatgaacagaaggggccggaagtgacctccaatgctgccctcactctgcggaacttttgcaactggcagaagcagcacaacccacccagtgaccgggatgcagagcactatgacacagcaattcttttcaccagacaggtaagaggaagatggtaccagctgtgagactgtcctcttaggagtctacgttgtaccaaaaagatatatacaaggcatttcaccagtgtttttgcagttaaccttttttaattggctagcatggtttatcttactcatttctactgtaatttaaatatctcaagtttcacagttctattttaaaagcattagaaaaaagcttgattaaagtcacatgaagtcttcttatgtcaacaataatgaatgtagatgctccaaagcatatgtgaaggcacaccctgccaaaaaagttagatcccaagggtcatgctccccttattaataagtatttacctttgctttttgtaggacttgtgtgggtcccagacatgtgatactcttgggatggctgatgttggaactgtgtgtgatccgagcagaagctgctccgtcatagaagatgatggtttacaagctgccttcaccacagcccatgaattaggtaagtctgcttcaaagtagaagttaagctcaattcagaaatgtaaactggtaaaacaatataagaaggagagtctgtaggttatattgctattttaggtcctagtgcatcttagaaactatagaaaatattttgtcactatttcaaacatggtcatttttattaaagtaaaaaataagatagtagtagctctggacatttggaaatgtgtatgtttgtttacaccctgtgaaaagtagacatggtctgcaaaagagccaatctcctaaatatatttctttctctagaaatgttattttgggacaaatgaatgaatccctgttgggaaaaaagaacctgctgcatatcatccatattttattttattattattttttttgagatggagtctcactctgtctcccaggctggagtggagtggcacaatctcggctcactgcaacttctgcctcctgggttcaagcgattctgctgcctcagcatgcccagtagctgggattacaggtgcatgccaccacacccggctaatttttgtatttttagtagagacggggtttcactatgttggccatgctggtcttgaactcctgacctcaagtgatccacccgcctcggcttctggaattacaggtgtgagccaccgcacccagccatgatccatactttaatgtgggttctggattgcttcctaggccacgtgtttaacatgccacatgatgatgcaaagcagtgtgccagccttaatggtgtgaaccaggattcccacatgatggcgtcaatgctttccaacctggaccacagccagccttggtctccttgcagtgcctacatgattacatcatttctggataatggtcatggtgagatattccagctactctctctagatggcatccaacctttcacgcataaagtttagttaaatgaactctttcctttttgttctttttattttccccacttcaaaattacttttcctctgtcaagatcctaactgttgagatcttaattccaaataaaaaatagtgcttccggttgagtagctcccaaagcccattcattcacattgttcgcagatcaataacttcctgtcattgttaatatagaaataccccattgaggataagatcttaatagtaatctaaatctcttcagcatttccctcccccagctttacagttttcagatcactttgctgtctattttctcatatgataaatattttctgaaatgggatctaccccttcatgccctcactaactctgtattgatattggttggcatttcctttgcaggggaatgtttgatggacaagcctcagaatcccatacagctcccaggcgatctccctggcacctcgtacgatgccaaccggcagtgccagtttacatttggggaggactccaaacactgccccgatgcagccagcacatgtagcaccttgtggtgtaccggcacctctggtggggtgctggtgtgtcaaaccaaacacttcccgtgggcggatggcaccagctgtggagaagggaaatggtgtatcaacggcaagtgtgtgaacaaaaccgacagaaagcattttgatgtgagtttttctactgaaacacattcagaattgaaaagaacaaagtgatggtaaaagatatgataccaagttaaacatccccatccgtgtcctctagcaggaatgcgagatagcttatttttagaactgattctttgtcccatgtggctttctttgataccctaaaagttctctttagataattctaatgctgatgatttatgtctccatttagacgccttttcatggaagctggggaatgtgggggccttggggagactgttcgagaacgtgcggtggaggagtccagtacacgatgagggaatgtgacaacccagtcccaaagaatggagggaagtactgtgaaggcaaacgagtgcgctacagatcctgtaaccttgaggactgtccagacaataatggtgaggagcaacggactctggttttaagaaactggattaaaaaaagatgtacccacaaacaggtggctcaagattggaaactgataatgttatcatattattctctttccaggaaaaacctttagagaggaacaatgtgaagcacacaacgagttttcaaaagcttcctttgggagtgggcctgcggtggaatggattcccaagtacgctggcgtctcaccaaaggacaggtgcaagctcatctgccaagccaaaggcattggctacttcttcgttttgcagcccaaggtagttcgtttttaccttatttttacctaaaaatcaaggcctgggcttgctaccttttcaaacaatttttgttatactttctttgctttccatattaacatatcttcaatttcaaatttgaactccttttcttttacattaattggcaactgcctgctttgagtttagtgttttcagttatgaatgaagcttaaatctaacacttcacatgcttgcaattgctcgctattactcttttatatgcaaagaaaagctttttggacagtcaagcgctcctctgtgcgactaggcttcacatacagctcatagttagatacattttatattcacacagtaaccagtagttttggaaaatagtctatgcatggtccaaaatacttgttactgggtaactagcagtagcaggtgcaaacagaataatagaagtggtagtctgagtattgattatttttatgtttgaaaacacatattgaactaggaaaagcatcatttcttttgctgttttgctaagggaatacatctggatctgagacagaaaatggaatttaatgtgattgagatgatcgtgtgtcattagcaccataggctatgaaaatattcccaagttgcagattcaatattcagcaagtgatttctgaagcacttactcttgccagatactaattattctaggctctgaagatacagcagtaaacaaagtgacaaacagctctactttcattgaccttagctggaggagacataggtcaatagataaataatttttaaaaatatctaatttcttcagatgtctatacgtagtactgaaaaatatgccaaagtgaagggtaaatgcatgaaatgcataatgtgtagagggtactgtgtttaattagcatggtcaggaaagtagagagaaaatgtttacacttatcattgcagcatctccttcctttgcttgtatgtaacactagacatgtgtccttttttcaggttgtagatggtactccatgtagcccagattccacctctgtctgtgtgcaaggacagtgtgtaaaagctggttgtgatcgcatcatagactccaaaaagaagtttgataaatgtggtgtttgcgggggaaatggatctacttgtaaaaaaatatcaggatcagttactagtgcaaagtaagttttaaaacacctatttgcagaccttataatttaaatgggcctttcaacaggtctgggaaaaaaatatgtctcataaaagattaatgtgtttttaagctaaataatctaattagccaatgaatcagagatttatgcctgtttttgtcacctgcagacctggatatcatgatatcatcacaattccaactggagccaccaacatcgaagtgaaacagcggaaccagaggggatccaggaacaatggcagctttcttgccatcaaagctgctgatggcacatatattcttaatggtgactacactttgtccaccttagagcaagacattatgtacaaaggtgttgtcttgaggtacagcggctcctctgcggcattggaaagaattcgcagctttagccctctcaaagagcccttgaccatccaggttcttactgtgggcaatgcccttcgacctaaaattaaatacacctacttcgtaaagaagaagaaggaatctttcaatgctatccccactttttcagcatgggtcattgaagagtggggcgaatgttctaagtcatgtgaattgggttggcagagaagactggtagaatgccgagacattaatggacagcctgcttccgagtgtgcaaaggaagtgaagccagccagcaccagaccttgtgcagaccatccctgcccccagtggcagctgggggagtggtcatcatgttctaagacctgtgggaagggttacaaaaaaagaagcttgaagtgtctgtcccatgatggaggggtgttatctcatgagagctgtgatcctttaaagaaacctaaacatttcatagacttttgcacaatggcagaatgcagttaagtggtttaagtggtgttagctttgagggcaaggcaaagtgaggaagggctggtgcagggaaagcaagaaggctggagggatccagcgtatcttgccagtaaccagtgaggtgtatcagtaaggtgggattatgggggtagatagaaaaggagttgaatcatcagagtaaactgccagttgcaaatttgataggatagttagtgaggattattaacctctgagcagtgatatagcataataaagccccgggcattattattattatttcttttgttacatctattacaagtttagaaaaaacaaagcaattgtcaaaaaaagttagaactattacaacccctgtttcctggtacttatcaaatacttagtatcatgggggttgggaaatgaaaagtaggagaaaagtgagattttactaagacctgttttactttacctcactaacaatggggggagaaaggagtacaaataggatctttgaccagcactgtttatggctgctatggtttcagagaatgtttatacattatttctaccgagaattaaaacttcagattgttcaacatgagagaaaggctcagcaacgtgaaataacgcaaatggcttcctctttccttttttggaccatctcagtctttatttgtgtaattcattttgaggaaaaaacaactccatgtatttattcaagtgcattaaagtctacaatggaaaaaaagcagtgaagcattagatgctggtaaaagctagaggagacacaatgagcttagtacctccaacttcctttctttcctaccatgtaaccctgctttgggaatatggatgtaaagaagtaacttgtgtctcatgaaaatcagtacaatcacacaaggaggatgaaacgccggaacaaaaatgaggtgtgtagaacagggtcccacaggtttggggacattgagatcacttgtcttgtggtggggaggctgctgaggggtagcaggtccatctccagcagctggtccaacagtcgtatcctggtgaatgtctgttcagctcttctgtgagaatatgattttttccatatgtatatagtaaaatatgttactataaattacatgtactttataagtattggtttgggtgttccttccaagaaggactatagttagtaataaatgcctataataacatatttatttttatacatttatttctaatgaaaaaaacttttaaattatatcgcttttgtggaagtgcatataaaatagagtatttatacaatatatgttactagaaataaaagaacacttttggaa

SEQ ID NO: 200 - DNA, 135356 bp, Homo sapiens
gcgcgcctgtcgcggtggtgggtgcaggactggacccacgggcccattgtgcgcccgcccgcggcagccaggaccatgtgggtgaacccggaggaggtgttgctggccaacgcgctgtggatcaccgagagggccaacccatacttcatcctgcagcggaggaagggccacgccggcgatggaggcggcggcggcggactggcgggtaaggaccgtggccgatccctgcaggaggggagccgggagcgctgcggcgccgcccgcggcctgggctgcaggctcgggagacgccgcccggtcccctggggctgggcgacccgccctgcctcgttgtatgcgaggcatcgagagtcgtgatgttcaggttgggcagagatgcttctttttttgactctgtcaggcttggggccctcagcgtactgagcgctctttaagtggatatgttgaggagaatgggaaagagtgagtctggggcggagggaatgtattatcccctatatattgaatgcatcattcccttcccctcccccccttaaaaatattgttttccaaatggaaaagagggatggaagaaggttaatttttgctccactttctttactggcaacagcaggatcaggtataaaatgctcttttgtttccagggaagcgataagtaaggaactgatgtggtcatttcctatatgagttatgaccgaagagaatgaatacggaaacaggaatttttttgtttcacctaattagacataaagcaaagcaaattgtctggttctagttgtaaaaataattggctgtataactgcattttaactatttttgctcaatcacttcttccctaaaccccctcccttcaaggtattattgtaattgttgctgaagccatgtcatatcattcaggataataagatcagtcagacccatatccaaagtagtgccatattagaaataatctcgaactcataccatactagagaaattggaccttctccatctctgtgttatttagaatgaacagaactggaatactttttacagtgaaaaagttagcagaagaaatagtagaggtttcactagaaaggagactgcaaaaaagagatgaactttgaccctcctcagagttgagcttatatcaacctcatatatcacctggagtttgcacaataggtaaattgttgctttcaaatgctgtgctatgaaataaagattcttgatatatgtatttacttatgattatatttataaactaattttcttaagattaaaattcaggtgtcatgtggtacaatgtatactggtatgtttgaaggatcttgattctaccagaaaagataaatctgcagagctccagaccccattctggaaatacttactagtgatctgataccaggattttccaggtcattttgtagaagttatctaactctaaatgttaatatgtaatttacatatctaatattggaatcagcccacattgtcctttttttttttttttttttttttttttttgagacagagtcctgctttgtcgcccaggctggagtgcagtggcgtgatctcggctcactgcaacctccttctcctgggttcaagtgattctcctgcctcagcctcctgagtagctgggactacaggcatgcaccaacccgcccggctaattttttttgtatttttaatagatggggtttcaccatgttggccaggctggtcttgaactcctgatctcaaataatccgcccactttggcctcccgaagtgctgggattaaaggcgtgagccacctcacccggcccatgtagtcctttaagcctaggacaacaacacagagtagataatttattgtagtaaaaagagaacatttccttctgcaattaaccctcctacaccttgtaagcattaagtattcatttacctgtgtcatttgtaataggatgtgaaaaattcagggattcagagccttctttttctgcttaacatttgtattgtgttcctactggttcttagagctataactgactacggtccacttgaaatctcatcttgtcatcaatgacttctttcacttaggtaaaattacatcttgtaaattgagaaatcacagtgattgcacttattaatggaataattgaaatcattgtcatgagtaaaagtatttatgacaacaaaggctattttcaagcaagagaggtaaaatgtttggtctaataccttggtgccatgtcaaatgtagcaggaacattttagaaatgttacacaatgtgtagtatattctgattctaatgtaagttcattcattcactaactcactaaatcatttaacaaatatttgttggcaacttctagaagtgctaatgttgtgaagctcaagcctagtagaagacaggtattgatgaaataatcacataaattaaagtaaaattgccactctacagagtcccagcagaaaacagaatccaaatgaagagagatgagtgaaaagacaacttcgaaaaatagaggcatggttatttgaactggtgtaaggcaaaccagaggcaggactctcaggagtccgtgagagctggagccagggaagaggaacttgagcctggagagaagcagctacttgtaaaaacatagacaatagcagaaagggagtggggagtacatgccctgacttctctcttctcccaccctcccagcttctgccactgcctcccatccctggaacccaatagaagccagctaaggaactgggcatggtggtgtatgcctgtagtcccagctgctggggaggctgaggctggaggatggtttgagcctaggcattcaaatccggactgggcaacatggtgagaccttatcgctagaaaaggaaaaaaaaaaaagaatctagctggaaagagtcctggtaatgtagtttcttgggatcagcctcccaggaatggatgggggcaaactgagaatgatcagaacaaatatcataagaagaggaacatgatgttggttagtcccagttaagtgatggggtcttggaggtggaggcaaaggaaagattccttgaggaagtgacgcttgagcttagaactgaagaaagaaaaagatctgcctgtgaggagaggagggaagagtaagtgttagatatcagctgttggagattttctggaagatctcaggacctttacataatatgcattatctggatcagtgtacatgtgtacacccagcaaatagatgacagatgagtagggaaacttgcccagtgtgaactggccagaagtggtctcaaagtgtggtcatcagggagcttggaaagattagcacagaaagctataaaaaacagtgggtcaaagttgaggacacttaacattttttaaaaattaagatattctaggttcctgattccaagcaatatgtataggcattggtgcaatgaagtcttccattgtggatgcatttgattgatttatttaaccccctttgactgagatttcatacatatacataaaattacagaaatcagatgcaaagtgcagtgatctactacaatgtgaacacttggcaaccaacaccaggataaaaaaaaatagaacaccaggataaaaaatatagaacactgctaatgtgccaaaagcccccttgtgattctcagccaatcattgtcacctcccccaaagataaagactatcctcatgcttttttgtaaacacttccttgattttctttgtagtttttccaaagaacatatccctaaacactatattttggttttgcttttttttttaagcaagaaatgaaatggaattatagagtatatattcatttgtgtctggattcttttgctcagccttgtgtatgtgatattcattttgttgctgttggttgtaattcattcatttttctgttctgtgtagaaaactatgatatgagtataccacaatttattcatctctttatcaactgtattgttggtggcccattggatggttcatttgggggcattatggataatgtggctatggtcattttggggcatgtttcttggtgcctgtgggcatacgtttctatttgctctataaacaggagaggaattgctagctcataatgtattatcaatttcagtagatgataccagttttccaaagtagttgtaccaatatactcccaccagcagcatatggaagttccccttgttccatcacatatccttgtcaacactgtcagtctttgtaattttagccattgttgtggttttggagtaatatcacattgcagggttaatttgctttttcctgactgatgaagttgagcatttttccatatgtttattagccatttggaatattttgagatatgattgttcaagtctcttgtccatttttcaaccggattgtcttttttcttactaacttgtagaaatttaaaaaatatgttctgggtataagcctactgttacatgtgtggcaaaatcttcatttgttccttacctatttactctgtaaagaatgaacagagattcttaatttttaaaattccttaagtcctgtttagataccatttccttttaaataccatttcctttatggttaatattttattgtgttctgttcaataagtcttttcctgctctgtggttataaagacattcttatatattctagaaatgtaacagttttaacccccaccttaacatgtacagatcactgggaattaatttttgcatattgtgtgaagtaggggttaggtattgtattttaaactttttgtggacattcatttgccccagaatgatttattgggaaggctattctgtcttcactgttctgtagagctacgtttgtcataaatcaagtacccgtatgtgtgtgggtctgttttgggttttctagtctatgtcttttgtttattagcatattcttgcaccaacaccacactgtagttttattttaattttcttttagattcatgggttacatgcacaggtttgttacataggtaattgtgtactgtacttttatcataagagtttatatgcagtagatcaagttctattatcttgttctttgttttctacaggtttcttgactattctttgagcacaatacagatgctcctctacttacagtagagttatgtttcagtaagttgaaaatattgatgcatttttttaacttaaaatatcctcaatttacagtgagtttatccagatgtgaccttattgtaagtcaaggagcaaaccgaatttgtatagcttccacatcattatgaagtaaaaaaaaaaatttgtaagtcgaaccattgtaagttgggacccatctgtattttagaatcagcttgcaaagtctcaccaaaacaaaacaacagcagcaacaaagatgttaaagctattgagattttgattgacattacattgagtctgtaaataaatttgggcaaaatttttacctttatagtatcaagtcttctgatccatgaacatggtatattcctttatttatttagatctttacaagtttttctcggtgttttatagttttctgtgtagaggttttaagcttcatttattatatttattcctaggtgtttcatatttttttcactctgttgtatattatgtctttttaaaatttcattttctgtttcttttttactgggatgtagaaatattgctgttttatatattcacctgtatccagaatgtagctaacttaagaaatgaattctggtaatttatctgtaaattcttctttttatttcctgcatacacaaccatatcatctgctaatatttacagtttatttcttttttaattcttatgcttttaaaaattgtctttgcctttcttgacaggctaggacctcatatacaattatgaattgatgtggcaattgtacatactcttatcccttcccaggtcttaaaagaaagactttcaacatttgttcattgttaagtatggtgatttttgtaaaattttttttttttaatttttgttctccttgcctgttttcattttattttattttattttattttaaggagttcttattcctagtttgccaagcgtttttgattatatttggatgctgaatttttaagaaatgcttttccatttttatcaatgtactagtgatttttcttttatcctgttagtgtggtaacttatagtaactgattttcaagtgtttacctgaacttgcatttataaagcaatcctaataatatagcattataattgtaatatattcctggtgaattgagcattttatcattatgaaatgttcacatgtatttccagaattgcttttgtctcattcttatggttagaatagatttatttggttagtatttttatggtatctctttttcatactttcactttcaactcttctgtatccttatgttttagatatgtcttttataaatagcagatagttgatttatttcctttttataatgtttagtaatttaattgttttttataaatagagacggggtctcactatattggccaggctggtctcaaactcctggcctaaaccaattcccctaccttggcctctcaaagtgctggaattacaagtgtgagcccccatacctgggcagttgacttttttcttactcaattttgaaaatttttgactcttaattgtattatttagttaatgtccatgtgacttggatttaaatctgctcttttattaagtgctttatactttttctagctaccttgtgttctttgtattttgccttccttgctttttggtgggatatgggaataattctttttaagttacactttttgagactctattagctagaagttttatattcattttattattcttttagtggttattctggacaatacaaatgcatttttgactcatccaattatattattaaccagtactttttttttttaccttttatttttttaaaggaaagccagggtctcactatgttgcccaggctggtctcaaactcctggcttcaagtgattctcccacctcagcctcccaaattgctgatattagaggtgtcagtcactgcacctggccattattttttattttttaaattgacatgttaaatattttctcatagattgcaaagaccatggaatactttaactccccacccccaatttacataccatttgtgttgtaatagtatattttaattcttaacatattttcaacccaaggacatgcagttattactatttttaaagtctgtattcagttggatctctacacgtttaccatttttgttttactttcttcttccctctctgaccatttttctggaatccgttttccactgccagaaaaacatcatttactctttcctttagcgaggacctgcttgtgacagcttttctcagtttttgtttgtctccaaatgtctttattatgctttctttcttgaaggatatttttgttttgaatggttggcacttaatatgttttaagcatggttgagacatcgtttcttctgaggtaaactgtcactctgaattgttgttcttttgtgagtaatatgtcttttttctctaactgcttttaaggttttctctttgactttggtcttctgcagttttaatatgatctagataatttgtgatgtttaaaaatcctgcttaggggtagtaggtgttctttaatatgtctttcgttggttttgtaaaattctcatccactgtctccaaatatggcctttccttcatcccctcatctctctttctggcactccaattacatgtatgttagacatctcattgtatcttctatgtctgttaccttttaagttttacttcattttggctacttttttctgatctctgttccaagttaataactatctccttaactatatttaatctgttcagcccaaccacttttaattatttttttaaattaaatattcctgtttggttcattgtctaattttcagttgttacaattctcaatcttattttttgtctcttttgagcaagtatggttcttgtaaggcctcaattaacttaaatatctcgagctcttttaagcctgttctgctgtctgttttttctcctaattttcattcatgctctgatgtcattttttatgtctggctacttttgattatgaactggaccttgtacttctagtttgtgaaactaatctgaaggagaagataatgttattttctatgagaaaaattttttctgccagttgcaaactaaaatcactaatttttggtactgatatattttctagctgagctctaacttgagtggatttgcctacttaggatttacagttatattaggtcatagccctccatcgtcccaacccaaagaggaaagggtggcatcattagctgccctacctctttggtggtactaactcctatcctggtccccccagtccaggattctgttaaaagcacatccagactctcagcttactcagcagccccttatggaaggggcacatgcctcccaaaataattgttactctaaaatatagagctctcccccttggagcctgtctttttttcaggtatggtaacttgttgctttttattttttgatattttgaaatatattttgtccagtttgtatagttgtcctgattagttgatattggtatagattatcttatctgacattataaggtagatgctattattatcctcagtatgtagaaaaggaaactaaggccttaaagagattgagtgatttaccctaggtcccacacctaataagtgtgagcctatttgattttgtatttattattctttttttttttgacagagtctctctctgtcatccaggcgggagtgcagtggcacactcttggctcactgcaatctccacctcctgagttcaagcgattctcctacctcagcctcccaagtagctaggactacaggtgcatgccaccatgcctggctaatttttttgtatttttttagtagaggagggctttcaccacgttggccaggccagtctcaaacttctgacctcagatgatctgcccatttaggcctcccaaagtgctgggattacaggcatgagccaccatatccagcctatttagtattcttctttatatgcatttatttatttatttatttattttttatttttatttaatagagatggggtctcactatattgcccaggctggtctcaaaatcctgagcttaggcagtcctcctgcctctgcctcccaaagtgctaggattataggcatgagccactgcgcccgtcctatttagtattctttacaagactgatatgctttggctgtgtccccactcaaatctcatcttgagttgtagctcccatgattttcacttgagtgggagggacccagtggaaataattgaatcatgggggcggtttcccccataccgtttcatggtagtgaataagtctcacgagatctgatggctttatatggggaaacccctttcgcttggctcttatttctctctttgctggatgccatatgagacgtccctttgctcttccttcatcttccaccatgattatgaggcctccccagccatgtggaactgtgagtcaattaaaccacagtcttttgtaaattgccccctctcagatatgtctttatcagtagcatgaaaatggactaatagattaattataatggtgtatattaatcttattttcctcttataaccaccccccatttgaaaatctaataaaagctatggactctaccttgagaaaaatgaaagcactccaaaaaattgcatgcaattttaggagtttaatggatctcaggtgaattagaacgtaggggcttcaagttaaaatatctcaagagatggagacagtttctcgttatacaaaatcaaatgtgtgattccttcagtaagctgttctctcagaaatgtgtttgtgtatcaactatgtttagggcgctgaactttacaaagatttaaaagaaaaagccagtttttgttgggtcacattattaaccttgagatgaaacatgggtgaacaaattcgggagatttgagaacataggcatggagatggtaagagtgcagactaattaagtccatatcaaattgttccatctgagttagagcattggactgtccaggaatttgacatagtgcattcagtggagacctccacaactagggagactttccattttataatcaaacaaccaaataattcccagaaatgtatgagaaataacaaagtgatattcatgaagccctgactggttaggaggtgtatgtttttaggataaatgctttcatcttgccagcttgtaagtactgtattagtaaagttgcaactagtagtgcttgtgtatttatttataaatacacagggggttagggatgccaatcccccatgcagtcaaaaatctgtataatttttgactcccccaaaacttaactcctaataacctactgttgaccagaagccttactgataacattaacagttgattacacatattttttgttatatgtattatatactgcagtcttattataaagcaagctagaaaagcaagtgttattaagaaaatcctaaggaaaagaaagtatatttactgttcattaaatggaagtggttcatcataaaggtttttgtcctcatcgtcttcacaaagttgagtaggctgaggaagaggagttggagggattggtattgctgtctcaggtgacagaggctgaagaaaatccctgtgtgagtagatccaggcagttcaaacccatgttgtttaaaggtcaactgtaatacaaaagcagttaaaatttatgttagctcctaatggaacttaatgttataattggtgtcaatgaaaagaatcaaactctgtaaaatatttaaagaagtctattctgagcctaatatgagtgactgtggtccaaggcacattctcaagaggtcctgagaacatgtccaaggtgtccaaggtggctgggttatagtttggatttatactttttagggggatggacataagacatcagtatatgtaaggtgtaattggttttgtctgggcagacaggactactcaaagaggtggggcttccaggtaacaggtggattgaaagattttctgatgggcaattggtttaaagagttattatctatagatctggaatcaatagaaaagagtgactgggttaagataggagttgtgaatagaaaggagtgactgggtaaaggtaaggggttgtgaagactgagattctttttttttttttttttttttttttaaacactcttgctctgtcacccaggctggagtgcagtggcaagatttcggcttactgcaatctctatctcccaggttcaagcgattctcctgtctcagcctttgaagtagctgggactacaggtgtgtgccaccacacccagctaattttgtatttttagtagggacggggtttcactatgttagtcaagctggtctcaaactcctgacctcaggtgatccacccaccttggtctcctaaattgctgggattacaggtgtgagccacagccagggccccaaggctcttacgtagatgaggtctcacaggtggatgcccttagtgggaatagatggcaagtgttttctactcagacctttaaaaggtgctagacacctagctaatctctttaggatcagaaaagtgacctgatctctgttttaatgttaatgctggtcagttgtgcctgaatttgaaagggagaagggtataatgaagcatgtctgaaaacccaccttcccatcatggcctgaactagttttttggtttctttgaagttcccttggctgagagaaagggtccattcagtcagttggggggtcagaattttatttttggtttatattggtgacttctatgtgttggggtgggcagtagtctatagctgtgtgtggagttggctcataatacatattattaataggaaaatgctgctgacaggaaacatgaccagacaaaagcagattttgcttgcttgtcccatgaatcccccccacctccatcccattattattatcaactttaagataattttgttcacagaattccattgtccataccaatttctcttgagactgatttattctacaaagaaaccgtgggaatgaatgcttataatttgtgcaggatttgacatgacatttaacaacttctgggtgtttgtaaactggccacaaaaactaggcaagaaaaaatttactccaagcgtcctagaaatttgaggaatttgaaaggttgaggcagacctgctgctctagggacactgcatatcctttctgctttgccttcctcatgcacagagaggacccactttatgaagagtcagattgtgaattgtgatatggttcccaggcctgaccacaaaagcctgttttgtagttatgtacagaacaggatttgtaattatgtggacctaggcagcttacaatgccaacagctgtggtaggtaccaccttgagttctgagtcttggaggtggaagcccatgcctgcttcatggcacagcagtgtgcagggaatgccacagacaaaagccctgagggtggctctttgcacagcgtctttgtgttctctgcctccctcactgacttctactctttagtccttcacttagtaagcagacagctggattcaaatcacagctccacctgttggacatgtgatttgcaaagtttctcttcctctctgagcttaattcccttatttaaaatgtggcttaataacgttttagcacccgttatgaagaatctgagataagtcatgtaaaatacaggaaacataaagaaccattcatagatgattgtcccatcattgtcctcccttggtgatgatctcatgtaggtattaggaggcaactggctctaattcacagcaatgtgtgagtaatggaagagttctgcagtttacagagacattacattttctgaaggatgctgttaaagcaaatggatatctgtctgatatttaggcagtttgacaacattaagtcaaatactcaggctttttggagaagataatttttgatcagcaaccttaaattgtttctacgtaactccttccatctgtccttccctccttcctttcctccttcctccctccctccatcccttcctttctctctccttccttcccttccttttcctcccttcctgatactgtatgtacattttgaaagctctaccagtaaaaggtagtttctttctttctctttctcctcctcctcctcctcctcctgctcctcctctctcccctgcccctgcaccttctttcttctctcttttctcttctgtttccttcttgcacaaatagtcctctctgagaatggcaaactggaatcaccagggagaggactggagtgggaaagacaggaggaggggtcaccttttctctttgggggtttgtggggagtgtgtgtatgtatagttactagaaatttgtaatttgaaaacatcctctactagtgaaactagagaactgtgaagaagtcaataacccaccttctgcttttctttgttttcttttcttgtcagatgtgcattctaaaaagcccagtggatgagtcagtctttttttttttttttttttttttttgagacagagtctcactctgttgcccaggctggaatgcagtggtgcaatctcggctcactgcaacctccacctcccaggttcaagcaattagcctgcctcagcctcctgagtaactgggactacagatgcccgccaccatgcccagctaatttttgtatttttagtagagacggggtttcaccatattggccaggctggtctcaaactcctgacctcataatccacctgcctcagcctcccaaagtgctgggattacaggtgtgagccactgtgcccggcgagtcattttttaaggtgttctgcaattgccactggcttctagttgatttcaaatggcatgtcacagttttgctgttagctttgttgatgaaaaaatccaaactctgtaaaatatttaaggagatttattgagccaaatgtaaggaccatgacccatgacacagcctctggaggacctgagaacatgtgcccggggtcattgagttatagcttgattttgtacattttaggggcacaagttacaggcagacgtgaaccaacccatgtaaggtgtacattggtttggtctggaaaggtaggacaactcaaaagggagggggcttccaggtcatatgtggattcaaagattttctgattggcaattgattggaagagttaagttattgtctaaagacttggaatcaatagaaaggagtttctgggttaagataaggggttgtggagatcaagatttttattatgtagatgaagcctccagatagcaggctttagcgagaaagatggtaaatgtctctgttttgtttttgtttttatctggacagggtctggctctgccgcctaggctagagtgcattggcatgatctctgctcactgcatcctctgcctcctggactcaagccatactcccacctcagcctctcaagtagctgggactacaggcacatgccactacacctagctaatttttgtatttttttgtacagacagggtttcaccacattgcccagtctggtcttgaattcctgagctcaagcaatccgcctgtctcagcctcccaaattgctgggattacaggcgtgaggcaccacacctggcctgataaatgtctctgatcagatcttaaaaggtgctagattcttaattaaatctcttctggatctggaggagatttggaaagggaaagggattctctgcaaaatgtagatttcccccacaagagatagctttgcagggccactttaaatatgtcaaagaaatattttggggtaaaatacttcaatttctttctttagggcctgctatttctcatgtaatgctatactagagtcacgttggagtttggtatcttcttcctacaaagaatctgttttgtaagtcttcagatctctgttttaatgttaatactggtcagtttttctggaattccaaagggaggagattataatgaggtatgactgacagccctcaccaccccaccctgctctattcttcctaccatggcctgaactagtttttcagtttacttttgaagtcccttggctgagaggagaggtccattcagttggttggagggcttagaattttatttttggtttataggttatttacatattctttcagggaacattagattgctagattttctagttgtgagatccactcaggaaatccattaagattttccttctaactctccactggagatctaagttaggaactttcatttggatgaaattgacagccaaaatgagtgattgaggtataagtctcactcctctctatttattaagccagctttagggcatgtctgggaaaaacactagcacagacacatctgtggctgtttttccaaagaggttttccagaggtttaatatgtttacatttccttaaagcaggggaaggcatgtgggaaaaggggaaggtatgatgtaaggcaatggttacattcctgggacactttaattagtgcctagtgaacctgcattttacataagataaggtgaatgtttgaagagaaagagcgagtaaagggggagttcattatgtagaccctctctgggtaggtggaggaaatgaaccttgtctttctcctgcacccaggaagatgagattgtaattgggtattactggtgtggaaaacactttagttttaggagctagacttagattgttgacctcaagttaaaattgtctgtccctgtttttggaaatccagaaaagaatttacttattaaagatcttttagagcagtccttcagcagatgcctgaggccttttacctttccatgggaacttggctaatacatagtgttaggaacagctattcatttggaagaggcctgttgtatgactcagcctctggactgaagttcaggggtctagagattattaatcaggggcctaaaatcaactcttttactttatatctgggtgcaaggagcacaaagctagatgaagttccatgaggtgatgtcagaaatgcacacccataactgtacctccactcctaccttttcagctccattattctaaggcatgctggacagatacttgctagagtgaagatcaagcagaacattaaggatttggtctctgtttacactgaacaaacaaaagggaactcttgtttatctaattctgtttcttctagattacttttaatgcttctgtttaaaaaaaattttttttttcaatatgatagggtcttgttattgcctaggctggtcttgaactcctggccccaagcgatcctcccacttcagcttccctagtagctgggactataggcatgtaccgctgtgcccagctttaatgcctcttaataaggaaaattctacattttggtaatatgtacaaatgaatttttaaaaattcattttataattagcatagacaatatatagacagaagagctaaaatttgccgaaaatctgtgattcaggcatcctgctgagaactttttcattctttaattgattgtcataataaccttgtaggttagatattattcccctttatatatgaggaaactgagttctcagagaagtatttacctgaggaaaccctggtagcataggcagagcttggatttgtactcatttttgattgagtttagaaaaagaaaaggattaaaatgggatattatttttacaaaaggagggaggaagatgatcttacagtgcatcctttagaaagctaaaggaaacttgggcaaagtgagttccagtcttaaaaattcagttttgagccaggtgcggtggctcagcctgtaatcccagcactttgggaggtgggcagatcacctgaggtcaggagtttgagaccagcctgaccaacttggagatactccgtctctattaataatacacagttggcatggtggcacacgcctgtaatcccagcaacttgggaggctgaggcacgagaatcacttgaatccagaaggtggaggttgcgccattgcactccagcctgggcagcaagagcgaaactccatctcaaaaagcaaaacaaaacaaaacaaaatttagtcttgagtgtggaaatgagggagctagtagagtgaggctgtaccttctcccttctcccatgttttgatgtcattggccattgtttgtcatggattatagttatataactgtatgccagggggaagtgtgaaaactatgtggattttctcaaaaaagttttccagtctttccccattttaaggcttctaagtccagctgtctttgggaccacaatatagagccattccaagatataaaattaagagggcattggacatttgactggaagactagacaaggaaagacttgtttgtatgaatgttcaacaaagaagacaaatattcatgcttattgtgagggtggtcactctcaaaaagttttgtaagccaaaaagtgtctaaaacagatctcaatttagaggtttattttgccaaggttgaggatgtaccagggaaaaggaaacacaagtcacagtaggatctgtgtcctgtgctttttccaaagatggttttgggaatttcaatatttaaaggggaaagagcaagaaggaggggagtaaaaagggagagagaggtaggcaatgaagcaagtggttacattcttaggaggctctgattagtcctcaatgaatctacattttacatgtgaaaagaaagggggggtcaattatgcattcatctcatgctcagcaaatccacatttttacataagataaagtaagcatgtgaaattacagctatctgtttgggaacaaaaggaaggcagtttttgcataactcggttcccaagcctaacttctccctttcagcatagtgagtttgaggtcccaagattttcctttcatagtttctagagaacaagagaggagaaatgcaagtttgacataccatgttgattttcattaatgtaatttgtgttaaatgtcatgaagattttctttgtttaatatctggtttatttttccttgtggacataaaattattattaaagttttcataggatcattacaacgttggctcccaaatcgattttttcttttagcagtacttgaaactggtagcaatttcaggaggtccttgaataatgtgagattatatacaagattggtggaattaactgtgaaggtgtatttttctggaactgaggctccactttttatcagcttcttaaattagattgtgaatcaaagaattaagagccgatatcctaatgtctaacattcctcaactccaaattttccaccaaagcgattttcagggatttagtattgtgcttgcagcaggattactataaattgtaagacatcttatatcatttccaggaaattctcttagcctttcaaccagttgaaaatgttcagttcactttgtattgtttaaacaataggaatgtatcactgtctgtgactacaaaatgataaacatgttagtgcttgtctcttactcttatcctggtacccagatgtggatcccttcaaccacagctcttagtttcttattgtggggaagaccctatggatgtgaatgtgagtgtgtgtgtgtgtatgtgtgtgtgagagagagagagagagagagagagagagaagggagggtgcagggagagagagctattcaggcagagatagacagagagatagagaatggagggagagagggaacagggcatggaataagaaaatggagggtctttccttaatctaggaactgatgttgccctggctgtccctcttcctgcagatcttccgctcaggggcccctcactaggattctctgtaatgtagagcaggggtccccaaaccccaaggcgcagtccagtactcaggaaggcaagcattacttcctgagctctgcctcctgtcagatcagcagcagcattagattctaatagcgccaaccctactgtgcactgcgcatgcaagggatctagattgtgggctccttacgagaatctaattcctgatgatcagaggtggaacagtttcatcccgaaaccattcccacccctgctgcccccacacccttggccatggaaaaattgccttccactaaactgctccctggtgccaaaaagattggagactgctgataaagagcatgcagttctgacaagtgactccactggttgcctcttgctaattctgcttccccacaggggaatggagagaagagtggggtccagatacagcacagtgtgttggcatttcctttttgcactctacaattcagctctcagcctaatcattgtacagttctgattgaatagcatggctaaccctacagatcatactctgctctacttaactgtcaggaggctaatcttcatcatgagaactgcaaacccctctttcttcctgttctctgttttgcagtggggtcacctctagtttctcaaatatggctctgcttgagtgtagccactgatccttaggaagaggatgccatttgccctttgactttattttatttattcatttattttttgagatacagtctcactctgtcacccagggtggagtacagcggcatgatcttggctcactgcacctctgcctcccgggttcaagcaattctcctgtctcaaacttccaagtagctgggattataggcacgtaccaccatgcctggctaatttttgtatttttagtagagatggggtttcaccatgttggccaggctggtctcaaactcctgacctcaagtgatccacccaccttggcctcccaaagtgctgggattacagatgtgagccatcgtgtccagatgccctttgactttaatctgtttatctgatctcacctgttcctctgagcccactgtctccttccccctcactctctccttccccctcactctctccctaataaaacccaattttccttcctgacaacctcagcttcatggtatattctagggaggtatcatgtagctttctttttgtaaatgactcataaatttgtggatcattatttttcagaagcctgataatcttgtcagtatcattccagtttcagggtgtgtttgcccagaaaagcactcggtaacttttttacaacataagtaggttaggttgtatccttgctagaaatatgtataatgagctgtgatccatccccgctttcttagtgccagtaaacactctggttgtctagcaaaagacagctcttatctcttgttgttgttgtcatttcagtttgtcacagggactgtgctcaattggatgttattgtacgccacagtaggtcttgctattcactgtgcaataactgtactaaactttgacatgtacacttttatttttatttacttatttaagacagggttttgctctgtcatctgggctggagtgcagtggtgcaattatagctcactgcagccttgaactcctgggctcaagtgattctcctgcctcagtccacaggtagctgggagtacagacacatacatgatgcccggctaattttttgtgatttttagtagagatgggtctcactatgttgcccaggctagtctccaactcttgtgcttaagtgatcctcctgcctcaatgtcccaaagtattggaattacaggcgtgagctaccatgcccagctgacatatatgcttataaaagtcacttgcagatttttatttctgatgtgcctataacccatttcattaaagtttagatgaacacaggattttataaagtccttagataaatacttttctttttccactcttattcatgagccagatctttgtcttagagagcccataatggttatgcagagtgggcaatagtattttcaaaaagcttagtaaatgtaggcagtttctttagggttaatcatctttcaaagggccttaggaatgtccttcaaacagaatataaatgtcaaagagaatatctctttctgtttgaaattatttgggcaggttgaaagaatttgataaagggaaattctatatttaatctttcattgtaaattatatgtgcaatgaaagagtttaaacatttttggagtttgctgtcttaaaggcctttctggaatgtaaggaaacccagcagtggtgtctgctaaatatgcgaatgtagttcttaacttctttgagactgctttttatctgaaaatgggagtgattcctcctaccacctcacatgtttattgtgagggttaaatgagatactgaaagcaaaaaacattaattaggtttttcaaatttgtgtttattatttttattttagagacagggtcttgctctgtcacccaggctggagtgcattcagcttgatcatagctcattgcagcctcaaattccttggctcaaacgttcttcccacctcaacctccagaatagctgggactacagtacaccccaccatatcctgataactaaaaaaaatttttttgtagagatgggggtctcactatgttgcccagactggttttgaatggctggcctcaaacaatcttccaatctcagccttccaaagcactgggattataggagtgagccaccgcacctggcctgcgttatgtatggcctaatatggtattaggattctgtgttcctcaatgtagttttctcttatcaaagtatccaccatctggctgggtgtggtggctcgtgcctgtaatcccagcactttgggaggccaaggtgggtgaatagcttgagcccaggagttcaagaccagcctgggatacatggcgaaaccccatctctacaacaaatatgaaaaattcgctgagtgtggtgacacgtgccagtggttccagctactcgggagactgagatgggaggattgcttgagtcctgggaggcagaggttgcagtgaagtgctactgcactccagcccaggagatagagtgagactgtgtctcaaaaaaatcagaaaaatccaaaaagcaaagtatcctccatctactcaacaaaatcaggatccgtggcaatggcagtatcaaaaatctacaaagtggccatcagctcggtaatagcatttaccatgtaaggatagtatacatgaaagagccttgtccacatggagcagaggttcattagaaagaaggaaggaaggaagaaaggaagagggaggaagagcggaggagagaaggagggaggaaaggaagaagaggaaaataaaagaaaaatgttgtttacaataactatttggaatggtaagttgtcagcccatttgtttttttgaatctaggtgaaacagaatgactattgcttatttctttggaaatggtatagtgcattatttttatgtcacatatagagttaaacagaacgcataggcagttccatgtaccttgagttttcatgaacctttagattccatataccctgtgaagacttcattcaaggacactcaaagtagaaacaggcagaaaacctacttaacagatatctggaggccatttgtccagactgcccaggtatagtcaataagattatgacttcatggaaatgagtatgtaaacacacataataagaatataatgtttagtttaaagttgtagcggtgtttgttgaaattaatagggaaaatggaggtctaggcattacagagaatcaaatttttgtcccggaaaaacctgaagggtgtagaaaacatctcccagatttctcttgaaagactttttcttttcttgggcaagtctggtcctgacatcagctgaacaaaggagggattggtatctggacatttaataactcttggcatttaaaaaaaaatcacataattattttcaaaggggagtaaggaaagaggcatattgtctgtattgtaaaagtcaaattttcaaaactttaaacaattaggaatattctttattgtgtagatagataccttttcctaaatattttaaaatatgtagttctctttattttttgtttttccaccatggatggagatacagcttatggctatagaggtacatttctatgaacaatgcttgtagttttaattttaagagtacaaggtgataaatggaaactgacactcagctctaacgtcaaggagacagtctgcagtgatgaggactggggaaattggagagttcatgctgtaactgaaatcagtagtcagaagctatttttatagtggcgattgtattgtacagtgtcaccatgatgtatattgttataatttacatatatattatctgttggattgtatcaataggaattttcatttcctgatattcattaagcatccttgaaatttgccccaaagtgttactgattcaaataatcaccctttccaccaaaaaaaaccctggtttcctgttaacagtgaaggaattttagggcttgatggggtgttatgttccttggtacagacagctgtggaagacttgagttctatgttgaaactggttttaacttgtaatggtgtggctgatgttacccgaccaacaccagatttcatttcagttaattaaataagtacttaatgagaggaagaaagaactgagcagtgttttatttaggacttggagaacatgggtgagtaaacagtaacaatgtcctaaatgggaaaggtgttctaatttcccaaaagtcttcttgtaattatatttgagacatcttacaatagtatctggctattaaggcagaatgtatttgcagatttaaatattttgcaactgcccaaagatatccattagtgtttggttttctttctaaataagacctgtgacaggtctctgacaaagacaagcaactgtccatggagacttgatgtcttggaggtcaactggagaagattaaggtataatatctcccatacctctaagtctcattcccatttaataaattaaaaccactgcatattatatgttattcgtatgtttatcaatactcctttgaatttgcattttcaactggtactacttctagggacagcagactagtgagcatagacttatggttaagagcctgacttctgagccgttacctgagtagggcctatgtgggcattgtgcacttagaaaaagatatcctttctgagctatgtcaccagaaaggcacaggcttccacgcagggctggggctagatttcagcaccacccatccctctcatccagatagctttatgcaatgtgcacatcactcagatggaacaccaatataccagttaaggcacattttcttttatggtatggtggaaagaagagaggttttagaataagaaaatttggctttgagaccaaattccaccagcgtgtttttttcatagagctataaagtaaaaaaaattgtatctgctcctcaggagtttttgtgacgatcagatttgtagtgagtgcactgaagtaccctgcaaatgtttggggtgtgtgtgtgtgtgtgtgtgtgtgtatgtgttttaaaactatggtgccattgtgtaggattttagaccaggtgttcattctataagacacgcaacagcttggaaaccatttacccttttgtgaatcaatcattttggtggttctagaaacctttattttatttttatagagacaggttttcactatgttggccacgctggtctcgaactcctggcctcaagtagtcctaccacttcagcttaccaagtagctgggattacacgtgtgagccacctcacccagccctttttccttctttaatgggtagtcaggagacaatttctggatttgggcagtgagactccacataataattagtgatcctaataatatgtaatattaattgagtgtttactgagagcctggcactgtgctgagtgccttacacatgctctcttcttgaccaacacaacagccaataagtagcacttaccatcatcattgtgctgcagaggatggcactgagtgagaagctactcagcaataagtgcttgagttggtggtatgtaaacacaggcagtcttccttgagtctacctgcttaaaccctctgcagcctacctgcctttcccccttgcatttctagaacctcaaaagcaagttcaaatggtcccatggtctgagtaagaatgtggctgactgtctttgggtaaaggacgagcatcatttaacttgagttcattgatgacaagcaattactctctgaatcttcggaataccagctcaaagcatcttcagaatggacagtagtagttccagtagtaagaaggtatatctgcaggattctccattttagagtgcaagtactcgtgcctcatacttgctccctgtgggcctcagctccataccgttgtgcatcaggtgattccatgtacaagcaaattcatgttctatttcttttttgttgtttgtttttatttttgtttttttgagacggagtcttgctctgttgcccaggctggagtgcagtggtgagatctaggctcattacaaccctgcttcccaggttcaagcaattctccttgtctcatccttttgagtagctgggattgtagcacccaccaccacacctggctaatttttgtatttttagtacagacggggttttgccatgttggccaggctggtcttgaactcctgacctcaggtgatctgcctgcctcggcctcccaaagtgctaggattatcacaggcatgagtcaccatgcccggcccatgtcctgtttcttgatgtctcatttagacagtgccgtcagatccattatttgtcagggtatctttgaaagtcttagacaacatctgatatcccctggtaccaacaatgtaaggcagagggctttttcctgaccaggttccctttggtctcagagtggcccgttgacaaacaccaggctataggatagacattaatgttacagtggcctgatgaggaagagctactcatgatggtcccatgcaggcttacttatcatatcaaggattcaactcttagaaaaagctttttagtgcctggaatcagagtgggactcaagggctgaagctttatgaagttacacaaagagacacataaagtgggtgaagacttttttctgcctgatttccaggagtctatacgggggaaggcataaaccctggctcttgctaaaatggagaattttggccctgcagaagccacaacaaaatacctggaaaagtgggtggtgacaatacattcaaaacagtgctttctcagtgctgggtaccccctgggggaaaaaaagacaaaaaatagttgtttgctcagattcaatgaaataaccactcaaggggatttttttttttttttttttttttttttgagatggaatcttgctctgtcaccaggctggagtgtagtggtgcaatctcggctcattgcaacctctgcctccgggattcaagcaattctcctgcctcagccttctgagtagctgggactacaggcgcatgccaccaggcccagccaatttttttgtatttttagtagagacggagtttcaccatgttggccaggatggtctcaatctcttgatctcatgctccttctgccttaccctcccaaaaggggatttttacaaaggaatatggcaagggagaaaaaccctgttgtgtcattattttttattctattttgaaaatcaaaaggaagggaagtgcaacctgttacatggaactgaaattatcatctccctggtgcctccatggggccctttgctgttgtgatggataaattgcagttcgagaatgtgtttgagtgcaatctcattttcatatcatcagaatcttctgggattagttaaatctcattgaaactgaggatttgttcaaactatgcatatctctcatatcttatgaaaagtaaattatctagtatacacattacgtctgtgtaattttacttttacgtagagcttcacattctgagatccaatgaggtggtttcatcctgtcgttatgggaaacgtgaaatgtcaaccttcagagagggtaaccaattaatggctgtggcaaatgaggactgcatgacagagggaaaatccaaaaacaggaaagagtaagaagaatagaaagatgttaaagcattgccaagaggatctagcatgggccccagaatgacactgaaaatttatttaccttccatgtgcctcagttttcatccagagaagtagatttcgacctggtccagtggctcatgcctgtaatcccagcacgttgggaggctgagtcaggtggatcacttgaggccaggagtttgagaccagcctggccaacatggtgaaacaccgtctctactaaaaatacaaaaattagccaggtgtgggtggcgcacacctgtagtcccagctacttgagaggctgaggaagggggatcgcttgaacccgagaggcagaggttgctgtgagctgagatcgagccactgcactccagcctgggcgacagagccagtctccttctcaaaaaaacaaaaaaagccgagcgtggtggcacgtacctgtaatcccagcttcccagctactcgcgaggctgaggcacaagaatcgcttgaacccaggaggtgaaggtttcagtgagccgagattgcatcactgcactccagcctgggtgacagagtaagactgtctcaaaaaaaacaaaacaaacaaacaaaaaaaacaagtagatttctacttttctaagatggctaacttaaattaattgaaagttttgttaaaactgttactttttttttttttttaccatttaaagttaaaaattttttaatataacccagaaacacttgactttgagagaattctgtttattttcccctttcattggattatggccaacattcctgactggtgcagaatatggtatcaaaagaatgtctgcagtatgtagccagtgacctttataacaactgtgtgcattgcatttggtggaacagtgtttaccatcttactttctttattaactttgggccagtagaacctgcttgttttagctttagccatggcaacaggccaaatatcagaatgactccctatactacttctgcaaatactttaaaaataaatgtgtccttcctcctataggagctagagttaaaagtaaaaaagtaaaataaaagaaatgtgcatggaaactctactctatttttctggtagactatgatttcttaaagaaaattttatctggagaaagaatttaattagcaaaaggtaatactccttccgtgcaattagagaaactagagatagcaaagagaggccaactgactgctcaggtggagtttaccagcaggtagtactttgatgggtgttatgccattcccacccctttttttttttaacttcctggctaattcgtcactcattcattcattcatttattcacttgttcactcatggaacagatattaggtgcttatcacatgtaggcaccaaggatgcagaaatacatgacaaatttctttgcttaagagactgtattcagcaagaatctgctgaatagcacattctgagtcagaacaatagatttttaatatggaaattagtttcttggtttttgataagacttaatgagaggctttcaaatgcacactgtaatatatgtgccctttatggaaaatagttatttgtgctgaatggggattatagcatcacaaaatgtccacgcttccatcctaggccataggtggtttgggactctgccccaggctgggctttgagagcctgaacgtggccaccagaatggggcctggcctgccccactgctgtgggcagtgatgcaaagagagaatcaaaggtgaaagtagatgcaggagccaggagagagccaggtagtcaggagtctgacccctcaggggcttgagaatcagatccacagtagagtcttccactggggcagtgaataggggcaatcactgcatttcaaacaaattacagataattagatggtaactcattatggctgtgttttgcacactaggctctgtgaactgctggggatctgtatacctctcagagtctaagttctctctataatttttaaatttgatattttcatttttgttatgatgttaagaatgctaacaagataaccttgatacaagtttatttggggttatcagaatgaccaccttatgactcaccactgacacccaactttagtgtttgagttggcacttggatttatgactgggttgaccgcatatcagttgttatgagatattgagtaaatgacagaggcagcttgactatgtaacagatgcatttgggcaaaagaagggcaaatgattttgcagcacactaagcaaagaatagagaaaagttgtggtagagtaactgctttgtgtaacaaagataatgtggtatgctgaattcaggagaacttgggccatgttactctgtacagcatttctgatcaagtcgtgatttagttttaacaaaacaatctcatcttgcacaataagtaaatgtggttatttcagactttcattggttttataattttaccatatttatttttaaatatagcttggttttataattatattataaatgagctttgaacataagaagtttatacttggttttatgtttgtgtgtatttaagtaacaccatttcaagacaaggtagtattgggggtaggggtgttgtgagaatgtctctactttcaagccccataattcacatttaggaaaagatgtaagaggagaaaagtttgcgcatgttgaccctgagcagctgtccctcaagcatcccctaattcttgaggttaataatttattagtgttctcaacaaagaatgtatttgacacaggcacaaatatactttttaaaatttttaaaatttttttttttctgaggcggagtctcattccgtcgcccagggtggagttcagtggtgcagtcttggctcactgcagcctccacctccaaggtttgattgattctcctgcctcagcttcccaagtagctgggattacaggcatgcaccaccacgcccaggtaatttttgtatttttagtagagacggggttttgccatattggccaggctggtcttgaaatcctgacctgaagtgatcaggagtttgaggtgatcaggagacctgccttggtttcccaaagtgctgggattataggcatgagccactgtgcctggccaattttttaaagttttgagtaacaatatatttatatggttcaaagatccaaagatattaaacagcatacagtggaaaatttctcagccctattatcaccgactctaggtcaccattgtatttattttttcatgttctccagattctttttgcatgtacaagcaaattacaatatgtaattttatcccacacttccctgaatcctttgtacaaaaaggtttttccataccgtgcttttttcagtgaacaattgccgtgcccaacccctattaactccaggagggaaggcaccaggctcaagaggccaaagatgagatccgcatccagcaaacgagatatggggttttactagagggaacttatttccagagtggtccagtgtcagtgagctggacaggagaactgccaccagttgtaaaaagcatgcactttatatcacattttaacttagcactctccccgtaacaacctccacccagcaaccttcatttaaactaaaacaaagggcccccatcccctgtacagctcttgttccgctggacctgacaggggttcagatgttcctcatagatgaggaatgaatctccaggttggctcctcttgaattccttaacttggaactctgaacacacaatcaggtgcatagaccatacagggtcgttctcagggtatgcttaagttattgctgtcaggttcatctaccgtacaatggtatatctttctgtatcaaaacatagcatgtcatctttcttttgctttttattttttatgattgcacattccattatatggcaatgccatcattttatttactcctctgttaatggacgtttattctatttttcggcatatactataaaactgttgcaataaatagccgtgtacatatgttatttggctaattgtgaaatatatttgtggaaaaaatttcaacaagtgaaatcgtagggccattggtatatgcatttgcaattttgataggtattgccaaattccccttcctaggggttttaccaagttgcacgctcacaaaccatgtgtgaggaatgtctgttttcccagtcttgcaaaacagaatgtgttatcatattatggatttttgccattctgacaagtgaaaatgatatttcagtgtacttctaatttgcattttcttttaagtgttgttgaacattttttcatgtttacaagccatttatagatttttttcctataaattgtacttgctctttgcccactttgtttttggtggttgctccttttcttattgaccaatttaggaactttgtatattaggtacatgagccttttgtgtgtgatctgagttgcaagttttttttttttttccaatttctcttaatttaatggtgtttttgacatgtagaagtttgaatttttatgtagaagaatatatcaggtttttcatggctttgggattgtgagtcacagttagaaagccttcaccactctaaaattcaaagagaatcttgaagaaaactttcaaaattttgtatgcatcagtgctggttaggttgccattgagaaaatggccgctgtgtacctgggccagatcatagttatgtgaggctggaaatttatggctcattctacatcattcttgtctgtagcatagcttcagggagctggtgctggacaaagctatatccagttgcctattgaactattaacagaccagctccgtccttagcttgtatcccatttctttttcttggtacttttgagtggatggtgagaaagaagaggtagagtagaaatgaccagctggtccgggacactgtgccatggccttgcattaatcaggcctgtttggtcccattcacaaatatgccatcatttgttatttttatgacatttagtatctcaaatgcgttcagaaagcaatgccacctcaatagttgagaagtggctttgatcttttaacttgacatttttggctggctcacacctgtaatcccagcgctttgggagtctgaggtgggaggatcgcttgaagcaagcagcttgagaccagcctaggcaaaatagtcagactttgtctctataaaataaaaataaattagctaggcatggtggttcacgcctgtagtccaagctactcaggaggctgaggtggaacatttgaacccaggagtctgagctatgatcacaccacacactccagtctgggcaacagagcaagaccttgtttctaaaaataacatagataaataaatatgaattaaaaataaatatacgacagtttgtggggcttatatgttaaaatttttctcatttcagtaattctaagagcctgtcccaatttgaaggaatctatgttaaagactgggaagtaggccgggcatggtggctcacgcctgtgattccagcactttgggaggctgaggcaggcggatcacttgaggtcaggagtttgagaccagcctggccactatggcgaaaccctgtctctactaaaaatacaaaaattagccatgcatggtggtgcacacctgtagtcacagctacttgggaggctgagacaggagaatcacttgaacccaggaggcggaggtttcagtgagcccagatgacgccattgtactggcctgggcgacagagtgagaccatgtctcaagaacaaaaaaaatctgggaagtaaagacctgaagccaggtctgtggctgacaccttctcttactaaacccttcaaggacactggcagtttggtaacgcaggttgaagccataatgatctaagttgtggaacatggacatcctttgtattcatgcaggttacccagggtcctgagaagagaagctgagagtacatagcatgtaacagtaattactaagcattattagagtttgtaattcaagatgccataatcactcagacacagtaaggcctttcttgtttggaagaactctaatgagtgggtcctgtgatttccattatacaatgtcatttgatagcctaagaaaaggttaaacatttaccccctcacaaagaggttgaatcaagtaaagagtggggaagggacagaaaagaaaaagggggattgagaggtgagagagaaccccgaagagtaataagctataactcaatggggaggagaactcccggtgaaatccatgttctgagaaggaaaggacaggggagaatcagaggcatgtccaggagggggtgagagtgacatttcagacaaagtagtgatgagagtcttttcctagtaaaatttaaaaaagaaataacaccagcctggagcagaaaataatgttttatttgttttaataataattgaagagtaaaaagatagtttacaagggtatcatttttaagaattatcattaggtcagaattttagtgttctctatcattatgtgatttgccagcctagcttctccccactcatcccaaggttccttaagatcaacatggcattaccaggacccagcccagtgccagacacatggtaagtcacttagcaaatgtttcccagatgaacaaatgattgaatgataaatgaatttgctgtttggagtatatttagacctctgccccaagtttaataaaaatatttatggtgctggctttaagacattgagttacctgcctatctgcagtaccagatggaaaggttaaggggaaggatttcaacaaccacacttggttgcagtttacattgctgcttctctttatttctgagcttttttccccctctttcattaatggaaaatgaatgagtgaaatttaaaagtgattagtggaatttctcaggcatgttcctttccttgtttccatgccatttgaagctattatggttgaagcttggtctgagtaaacattttctcaccccccataggctcccctgctactatgaattgaacttcagttaactacttccattgattaaaaaacagactcctataggagtcccaggacaggggaggaataaatcctggcctggtgatgggacaggccagacctgggagaatgggctaggtatgtagatccactgaggctaggcatggagtctggtaagggctcagcagaaggcagttggttaaggtctaggccgagatgagcagatgtgagcaggtagaaggactacatgctcaggagatatgaggtgttgggcaagttatcaagacgggcattcagtcacaggagaacaattctagacactgggtcaaaatgatcctgttattaataaaaccagcaggaagatgggggtttggaatctatcaacattccagaagttacacaaatggggattacggagaatactgaaattgttatagattatcagctaaaaataatgaaaatgggaaggatgctgtggaatctgaagtaggtagggattgaaataaggttgaattttctggaagctagagaaagtccaattattcctctttgtatttgtgtgacttccctcttagcatcctcaactcccttgaacttatcctagaagctgatgcatcgacactccacaggctctggagtccagccgccctggcccaatgactggagctgccacttagtagctgccacctggtagctgcatgccccagtgtcctcattcatcaaatagggataataattgcatgtatgtcttaggatattgtgaggattaaattagaaaatgcacataaagtgattaggagcctacctggcgtaaggtcaccactgttagctattactgatgatatttgattgttgtttcaagggttaattgaaatagtgtatgtgtggcgtatctagtacattttagtttcacttctgcctttttgtaacaaagccaaccagaatataaacaagatttatagtgcaaatggagaccatgttccccagaccccgctgcaccctcagagaggggcccccaggatctccagtcttccccacccttctaggtccacttatctgcggccagttaggtgcggtgcaagtccgggaaccttcttcaaagactggctgagctgagtgagggctctgacctcggtgaaagagcactttccaggagcaaagagagaaaggagctgcacttgcctgttgggccactgtggctcctgtctgggcgcacacacaaagagctggtctgtggtctcacctacaagggtcatgttgttcccttccagagaacaaacagaaaatattaaacctgctgaggctggaacttgtcactgaggttagaagcttacgggtcaccttagaaaccagctcttcaaaggttactcctccaggaagagggtgcattaaggagcctttcccctaacagaaatagcaacagcagagaacttgccctcttctctgggatggccaatattaccacccaggtaatatgctggtatcctcactggccctgacgggccacagcctgcatttcctgtgtgtgggaagcagcagaatagactggcttggacagttgagcaaatcccagctttgctcacttaatgtctcagcctccatttcctcatctgtgaaatggagataataattagctggggttttgtgcagattaaagagataattctgtattaggaaacctcctagcctaaaagaaggggcttaataaatctcctcttcctcataagaagtttcctaactggtcttctgctcctgttgtctctttcctaactaccacacactgttgttagagtggtttttatacaacaacacatgtgactcctgagcccagaaactttttgttttattgataaagtttaagcagtttatcttgaggctgcccaccacaatctgatgtctatcccaaacctttcaagcactcccttgctattgagctgatggacttactgctccccacacatcccatgtgccttcccaccttgggggctgccttcagccaccgcaatcggtactatttattgaacacctaccaagtgccaggtgctgtgcaaaattggttcatgtgcaatatttcctttaatcctcattacaacctctcaggaagatactattatcttcattaagtgggtgaagaaattgtggtttttatcagttatatagcttgccccaaggtcatgaccctaggaagcagtggaacagggattccacccaggttcttaatgcaaagcctgtggttttgaaaagctaccttccaccaaacccaactccaggaggcagttcaaaacagtctcctgcatgagtatgccagccttgggtaagtaccgtgtaacatcttctgtattacccttgagctatgtacccttgaactgactgagcaaatgaccattctaatgattgctatttgtatgtgctgcttctttcttcgcagccagatcctattctcaaagacatcagtgatagattatatttctagtgcccagcaaagcttcctctccacaggtgctcagtgtctatttcatgatgctaaggatgaaatcacatcatgcctccaggactaaggccatatttttcctttacctcttctagacactaataatcatggtgactacttcctgggattcagaacataactttagcaagcacttccttccagtgcccagcttccttctctgtagaaaaagaagatgcaagtttatgtcttgacgctccttccctgctccaaaattaagcattatttaaagaaaaatcctagttagattacatgagtgagagactctacagtttttgaagcactcccatacacagtatgtcatctgtttctcagcagccctgggagactagcagggaagatgaaatatccctgatgtagtggcaggaaactatgactcagagaagctaagtgacttgtctgaagccacacagcttgtgagtggggaaatgaagacttgaatccactttcttttatttatttatttatttatttatttatttatttatttatttattttgagatggagtcctgctctgtcgcccaggctggagtgctgtggcatgatctcagctcactgtcacctctgtctcctgggttcaagtgattctcctgcctcagcctccgagcagctggaattacaggcacccaccacagccagctaatgtttgtatttttagtagagactaaaaatacaaattttttttgtgtttttacaaaaataaaaacagccttgccatgttggccaggctggtcttgaactcttgaccttaagtgatccatccaccttggcctcccaaagtgctgggattacgggtgtgagccaccaggccaagactgaatccactttctctgattactttacacaacactaggtaggaatattagggacattcttattgctgtcatagaaataggccagaacaaacatctaaatgtttttccttagactgctgggtgctctttcggatttaagttaaatgagcttagtttttctaggggtttccctggtgatcttctggaaattatttgaaaatagccatgttggtaatttcctaatcatgtggcttgttcgttgtgaaaatgttcagtcattgttgttgcttattcattggactgtctgggaagagctaaggaggtatgaggccctgggtttatgtggggtaattattacatggaggattatatagggtagctctgactctgttttcctcagggttcattcagaggagagagtaatgaagaccagagatcctcacacttttgcaaagaggggattgttctgtcttaataaaaatgttcaaagaactagcataaagatcaggcaaatgtcctgtgagtcacctcccaatgtgcatagctgaatgtactttttttttttttttttctgaaaaaaggaacagaaaaaaaactaggtatatcacatttaaataaaataaagcatatttcatttaactttttaaaagcaaactatggggaaactatatactatttactcaattgaattagtatatactaattactcaattgaatcccatcagtatgcattgaaattaaatgtatagaaatattgtagagtaaagcactattatctaaaatgcttttatgctttatttgttctaatacagagctttctacctattttcatatcatagcatacttagaaaatgatagtgtttgcagggcacaaaaggtatcctaagagccaagagaacaagtatattgctagcttgtcatcatttcctggggtaccactgggaagttgtgacctgtagacttaaagaaataagttggggggctcctggggataccatggctttccagtctgtctttcatgactgcactgtgttctacccagtgggaaccctgagaacatgaaacacatacttgtcccaatcacataatcttcacgctgcacctgagctgtagaaagaatctgtttccctgatctgtgttctagatttcatagaggccccggccttccaccagcaaaggaaaagttttgaagccagcaagttctgagatgagatgcctagtgctgcccttgcccattttcagctgaaagtgaaggtttattgtacccagtatatgcttcagataaattaatttgatagtcataaatgaaatattgtcccaacaggaaagctgagtcatgtctaaaaggattatgcatggtgaattagccattaacaaagaatcattgccattattgaatcatttatgtcatagttattgaacaggaaggcctctacggttagaagaagcagcttaaatgttgttgtttttataactggaaaattttaaaaacaacaacttgggcttttcccctctccctctctctttcctgacccctctcccaactccggctccaaaacaagacaggaaagttgggcaaaagctcctgtctgcatctcctggttcaggtaacatatgttgattctctaaaggattatgacttttatttagggtgatgtaacagaacgtgaggaagaaagtgaaacctttgtttattcaaagaggatattctttgagaaacactggcataaaataaattcttgcaggtgactgtcttttaaaaagtttcaaaatatttattttgatataacccaagtctttcattgtattattgttttattaaatgcagagataggttgagaccaaacctggagttgctttttttgttgttgttgttgtttgtgttttttttttttttacagcccccattactctaaactcagtttaaatgagcatgttttaaatcagcatagtgggttgtagagggtgtgggtgtgtgtgtgatttttgctttaaggaactaggtgtagacaatataattaagggtgaaaaaaacgtaagttcttcattactttaaatttccccattcactaatcaataatataaaaataatttctcccaccttgtgtttttgctcatcagtttctaactgaggatgtaaggagtcagtgatactgttggtatcctacccctctgttgtgacaagtttatagcatgaaaagagaatggtttcctggaaatgactttgtaattactttgcaaagaagggcccccaactctagtacactacttttgttattgccaatgatgatttcttctcatccattattgatatttttttttcttttttgagacagggtcttgctttgtcacccaggctggagtacaggggcacgatcatggctctctgcaacttccatctccaggttcgagggattctctcacctcagcctcccaagtagctgggactctaggcaagctccactacacccagctgatttttaaaaaactttttgtagacataggagtctcactgtgttgcccttgctggtctccaactcctgggctcaagcaatcctccttccttagcttcccaaaatgttgggattatgggcatgacccactgtgtccaacctattatcaatgtttttcaaaacaggtttcaagctatcttcaggccatgactaaactacttagaaaatttcagttgggcctaatatattctgtaagggacttatctacatttacaggtcatttacatttattgaaaacacatcctgttacaatagacatcttgataaaataagggtgttactggttaccgtacccatggttttgcacagtcaaaccatctttggtgagcttctttgttttgtttctctcccttgttggtgccagggtgttttctttattttcaggtcttccgagctcaattttctctttaaggctttatctagactttagctgaagattgctcccacgttatccatcacaaaatgaaatttgtctgtgaggtccctcagtcttatccaggtggataaaggctaagatagaaatggaatgcaggtggagttgcttgccctcaaagtgatgaggttccacgaaactcccaggaatcaagccaggctgctactgtatctctcccttgcaaatagcatgattgttttaattacagtctgtagccactatttttatctgtgttagaatatttggatgcaagactggaaaacattattgctgttaatgcctttgcaccttcttatataacttgctatagtgtggaagggaacatttactcaaagagcctatccagatggagccaaaggggttagttagggtttttgttggtcactttgggttataaggaacaggagtcattcaaggtactatgaattcaacttgctgggctttgttaccaggatgtatgcaaactgcagccagtctgaaagaccagaagcaagataactggagggtataaactgaaaattctaagctcccccaactgattgattggaccccttctgtcagccaaggggattccaaagtaaacctgaaaaactagttcaggccgtgatgagaaaggggggtcagacatgcctcattatactctccttcctttggaattcaggcacaactgaccagtattaatattaaaacagagatcttaagactgacaaaacagacttgctttgtttgtttgttcgtttgtttgttttgagacagggtctcactctgtcacccaggttggagtgcagtggtggggctactgcttactgcagcctcgatctctcctggcctcaaaaaatcctcccaccttagcctcccgagtagctagggctataggtgcacaacgccacacctggctaatttttaaatttttttgtagagacaggatctcactgtgttgcccgagctggtctcctgggctcaaacaatcttcctgcttcagcctcccaaaattctgggattacaggcatgagccactatgcctgctccaaaacagactctttgtagcagtaaggtgcctaattccaacctgactctagtatagcatcacatgacagagagcagactctgaaaaaattattttaccccaaaatgtatttctttagcatgttttaaaatggtcctggaaagctatctcttatggaggaaatgtacattttgtagaaagtcttcccttttcaggtctttttctgatcctgaagagattagctcagagcttagcaccttgtaaaggtctgaagagaaaacatttgctgtctgttgcctctcagagtggccacctatgagacatcatctaaataataagaattttggtctccataaccccttatcttaacccaaccacttctttctaacgattagaagtctttagatcataactttcaatcgccattaagaaaatccttgaatccaccaaagacccagaagcccccactttgagtggttcctcctgtccagaccaagttgatatacaccttacatgtgttgattgatgtcttatgtccctgtaaaacatataaaaccaagctgcaacccagccaccatgggtacatgttctcaggacctcttgagactgcctcaggccttgaacactcatatttggctcagaataaacctctttaaatattttacagagcttgactcttttttgccaacaagggaagtggctcatcttttcatcctaggccacgttttagccttgtgtgtttgcactaatcaaagtccctggtgaaaggctgcacaaggttgccttattctgtatcatcttgcattcacctcttcagccccccaggctaatattatgccaagggttaccgattctgatttttgccagtgacctttacagaaagcagcaggagctgattggttaagtggcttcatcatttacaaactcttatagtaggatctttaatgtttcattgatcctatagtattaaaaactgcaattacttttgcaccaacctagtggttcattatttgattataatacatgtacattgtacaaattataaaagtacaatgttttatagtgtatagttccaatagtatagaaattactttaaaaaatatagttttttttttttaattctttttcagagatagggtctcactctgtctcccaggctgaagtgcagggtgtggtcttaactcactgcaccctctacctcctgggctcaagtgatcctcctgcctcagtctcccaagtagctggaactacaggcatgcaccactacaccttgcttaatttttaatattttttttgtagagacaaagtcttaattattgcccaggctgtctcagactcctgggctcaagtggtcttcccaccttggcctcccaaagtcctgggattacagtccactgtacctggcctaaaaatatatttcaaataataaaaaatgtttctgatttctgccatatcaatctcattcccaagaggtaaccattattaagtttaatatgcatctttcctggcatttcctttgttaatataagcacagagtggctggtctcctgggcttttttctttgtcttgcttatatgtagctgaaggcaacaccatgggtacttagagatttaatgaatactcagtggaaggcccatgaggcggctcacacctgtaatcccagtgctttgggaggccaaagtgggaggatcccttgagcccaggagttgtagaccagcctgggcaacgtaatgagacccccatttctataaaaaaatttaaaaattaacctcaagactcagaccttagttatagattaaaagaagttaatcacctatgtctttagatgaatgcacacttacatgtagacatatagcttagaaggtatataagctctggaaaactgtaattttgagttggtctggtgataatttccaggccttctccctgtaaccggttgcagaaataaaaactttcttcctccccagttcatttgcatctcgttattaggccatgagaaatagcagcccgaccctcagtttgttccggaaacaatcatgccactgcattccagcatgggcaacagagcaggatcccatttatctatctatctatctatctatctatctatctatctatttttttgagatggagtctcactctcttgcccgggctggagtacaatggcgtgatctcggcttcactgcaacctccgcctcccgggttcaagcaattctcctgcctcagcctcctgagtagctgggacaacaggcgcccgccactacgcctagctaattttttgtatttttagtagagatgggctttcaccatgttggctaggctggtctcgaactcttgacctcgtgatttgcccgcctgggcctcccaaagtgctgggattacaggcctgagccaccgcacctggcatatatatatattctttttttttaaagagcatattcagagaatacttgataaaaatggtaaaatcaatttgattcattttgacactgtaaacttcctgacttgagataaactagttattaaacatcaagtgcctgcaactggagtaaggaatgtgattcagtgtgtatgaatacgtaccagtttgtagcattgatgaactccgtataccagagggaaaaaatgaacttcaaaaaaaaatttctaaaatgtaaacgccaggtccctctccaaggaagtgtgtttttgagggagcctctcatttagatatggactcttagctagcatgttgcaacctagcaacaagatttctaacctgtggttatctgttgtgaagtagcagcgttagtataaccatggtaactgtctgtttgcttgatggcatgagctctctttgagtaaaaaaagcccaaaataaaaggttggaggtaattatatattttttgttttctcatcataaatgtattgaatgtacatttgagatatttttgaaaacacagaagaccataaaatagcagaattgtcatctcacctactaatgttaatattcatatttagttttgtattctttaaaattaatacatgtattgtaatttgtaatataggttatattatacttttttagacaaattgggatcatacagaatagtaattagttttgtgctgtttttcatatgctaggtgcatttcaccatgtcatgaaataattacttgaaggtatgattttaaatgtctacatattatatcaatgtactataatttatttagacattgtaggtcattacctaaatgtaattttgaattcagaattatttctatttcatattatttcgttgccaagttgttcttcagcttatcgatgctctcaattattggcagttgaattacgtaagaggatacatgaattagaagaagggttgacatctcaggacagtgagtggcttctgcaaatgtggccttcctgagagaagggatctgaggggtattgcccccaggtatccaggaggggattgatatagctaatctcttagaaacagaggtgggcttcatagcgatgaactcttcctaccacaccaaaaaggcccctccttcctacctctcaaggttgaccttggctgaccttgacctttgagttttaggttttcagacccgcctctacagccaagattagaatcaatataacttcctgttgcacacagaagcagctgtaaatctaagacaatagcatccactttcctattacgggacttgaggggaaattaaattaagcccccgccttttgaggggcttctttgaggaattagatcacacaaggcttggcgtaattttttaataacttcaatcacattgtcctcactggtccgtatcagagcagatttgagtcctgcacaaagtctgaaagcagcaagcttgttcgtggggaaagaatgagccaacacactgctggggtttcaaggccagcttcctaggtatgcttgtacacaggaacctacacttagaaaagcgctgggcttggcttaatattctactgctgctgccttgaaattctgaagaattttttaacaaggggtcctgaatattctttttgcactgggccccacagattatgtagttggtcctgattagggtgtagagcaaggtattgcagtaataaagtatttgaatcattccttcctcagaccacccccccacccaggagaaggaaaaatccattccaactgttctcactttatgcaggagcaggtgcttgtgactttaagagatgggcttgcaggggaaatggaacagctcctggaagacatggccttttgagggtgcttaggagatttgagcagcacatactaattggatacagataaaatgctcttcagattttagttttctgctctgtttgtttagtcataacccagcctgtgttttatcttttgaggtggaaaatatgaaagtcacggcttctctctctcttgttgagcatttactttgtgagtacttatatgaacatgtatatcaaagaccctgtgatccagaatactgcttaaaattctacagagtgggcgctccacctctcttagctttgtcattcttctccctttagctcactcccctctttgtaagaaatgaggcaggggtctctcggggatcacctaacacactagttcatattcccagcactttttaaccagtgcccctcgggataaacatacaacaaaaccctcatgcctccttcattcacatatgttgagttttatgttagtttgttgagttttatattggtttgcattgtgaaaacagtcattttttcccaaatgagagttatagaattgcgtgtgctctgtaaagctatataaatgattctaagaaacacagtcccaagaacatgactgccctagagcctctcctcccctaatttaatactgtttaaagcaggggttcctgactgtcaggctgcagacaagtacctgtcagtccgtggcctgttaggaactgggctgcacagcaggaggtgagtggcaggtgagggagcatttgagctccacctcgtttcaaatcaactgcagcattaggttcttacaggcacgagaaccctattgcgaactgcacatgcaagggatctaggttgcaagctccttaagacaatctaatgcctgatgatctgaggtggaacagtttcatcctcaaaccatccccagaccaccccacccccaactctggtccatggaaaaattgtcttccatgaaaccagtccctggtgccaaaaggttggggactgctgacttaaagtaccaaattttaaactgttaaccagtctgcctccagctaagaacagatattgagattaagcatttaggaacctagaacaattgtctgttaaatttaatcaaaaaattggaagcttgtattttttatgtcttttttttttttagtattccatatgcatcatatttttacaaaagtgtcagtctgtaacagattgaaaactaaaaaacaaagaaaaactgatttttttcagccccgtcccccagttggcaaaactgattcttagccacaatgtttgagaagcactctcctaattgagtcaacagtgtatttcttagacttcttaattcatcttttgacgaacaatgatgaattggggtgtgtgtgtgtgtgtgtgtgtgtgtgtgtgtgtgtgtgtgagagagagagagagagagagagagagagataaggctggttccttccccacaggtaacggtgtcatccttgaaggcagccatgatacaggggcagctagaatggggttatgagaagcagctattgaaattgagaggaaagagttgtggatggccgtttaaaacaataacattccatagtaggcttgttgagaaccatttttatctagagatgctggagagtggaagaatgtatgatacttatgaaaacaaaattgctcccaccattcgacactgaaggtagtatccaagtattgggattggttacatgtctatccatgcccttctaatctctttcccctattgccaataatacctgcgcctgagaataatataatactctttgaggtcacggaacagaacaatacattgtacccatctcctgtcccagccaccttccctgacaaacctcccacatcccccacctccttacccatagaacagccaccacctgtattcccctttcatacataatgtggctggccaacattagctcacatgtaccttcacattggctatggtgcctctaggaactctggcgcatttataattatggagctgaccctcacctggccatttcagcattcttcacacctgcacacagaaccattttcctaatccctcccttggtcccctggccagtatggtgtgcaaaccgtatttaccagtctgtgtgttgggcacaagggtttcaattggttaattaaatctgtgaattttcttgtttattgacaattgccaaagtaggagaatagagacttgtcttttccctgaatatttctgcttttgatctaacttaattccagataaatttcaatactgattaaaaagtaacaaattacttctgaaattggagaaattgatttcccaaggtaagcagtttcagatatgagtttggtttgcattattacctcacagtctttgaaatgggatttttagctgccttctcaagtctttgtctcctttctaagattcttagacaattttaattatttaaggcagatttgctagaacttataatattggaaactatggtacaaagatgaattagttcttaaaataattctggtttctcccaatgttcatcaaattgagaattttgtggtccacattataaatattcagcataatgtgctgaacattattgtaggctttgagactcccaagataaataaggcagtgcttgtccttaaattgcccagggtctggtgggaggaaaccatactttttttttttgaagtaggaaacaatgtagtaattaccttagtgtaatataagtcaagatggttggcagaacccaaaaaagctaacagttaattgccaggagatttggggggcttgagtgttgagaacattggttgggagcgtgccggagaaaacagggacacatgcattaggtgaccttgacctggatattgagggaaatagaagtttgccaggatgagaaacacttgtacaaagccttggaggctttaaaaagtaacaagcagacaaacaaggctcattaaagaagtgtaaaagttatggtatggctagagagtttgtaggtatgtcagcagctgcttctgaatgtttccatttaattactttctgaccagtatcatgtaagtgttaagacttctagagaatgtatcacttacatctaaggagcagcagccagaagaacaggtggcagcaggtggcctacagaaacctaccatcttcgcagatagtaagccaggcatggaagtgatgcactggagaggaagtactgagccaaaagtcttgcatgtgtatagaagatatataaagaagtaaatccaaggatactgcatctctggctttagggagatcagtgaatatttgctgaaatgaatggaaatccagtatgtatataaatggaagcttctagatggtgaactctgaatgtctaatgggacctcttagcaaatgtcaccacaatgggaaaggcaaataactcacaaaaaaggaaattggaatggccaataaacaagaaaattaattagtaatcagaggaatgcaaatttaactaacaaacaggtaccatttctcactctagagattggtgaaaataaaaaaaaaaacctggtaatactaagtattggagatattatggagaaacaggtattctcacactttcttgagcactttagagagcaattttgtaatatctaataaggtttagaaatgaacttaccctaggacctgacaattccattctaaagaaatgtgcttaggtgcttaaggatttatgcaaacagaatacgattacagttgcataatagagcaaaaagtgtggatagatccaatgtcctttactaggaaaacagataagttgtaatatacttatatagtggaatattgcacaatattttaaaatgaatgaatcagatttacaagtatattctggataaattttacaaacatattgattgaaaaaaataagctgcagtgtaccttgcagacaaatttgtaaaatactcatcagttttaaattttttatatgaaaaacatggctcagtaaaagtataaggacctggataggaagaatacaaaacaatttaagaatggttaatggagagagggaaatgggattaaaggagtgcaaagggaacctcactgtggctgttaccttttctttctgttaaaaaaaaaaatagatcggaagcaggtaaggcaaagtgttaaaaaagtcagagtagtggtacatgtattttgtaatttcctgtacttttctattgttttgaatgattcattacacaatagtgcttagtgcatactaagcactttctagggtagatactattatttctttatcaggaagcaggggcacagagagattaagggactggctggtatgtgagccaaagctgagcccactcccctgaccactctgccatggatttcctggatctctgcttcattttggaccagcgtcaggactaatggagtcggggaggccaagtgatctttaggatcctgtccagtttaactttagccctgatcatcagtagatggatcgatcatttccatgagcacatttctgcatggcagcacactcctgacatagcccggcctgcagagggctgacgggggtttctctgcagcactgtggacctgccacctgtaccagctcccagctaggctgcagttgtgcagtggtgactgtgcatcacacatcttccagtgcccacaaccaaatgggaagcaaatatggaacaattttgccaagtgttttctgaatctccttgaaaacagcacttttacattataagatgccactgtactaatgtaataggtagatgcagagaagagttattttgagggctgtaatttgatttcgttatcttaggcaatcaagattgtttaacaccagaaatagctgactagaacagctgctaaaacagcgctttgtgtgggaaatgaagaaaaggttcagtattttgacagccatttccaaggtatgagtaatgagacttctaagaaaatcgtaattgttgctgcttttgcagtggggcggggggattctctagaccagatttcccatctcctagtattctacatcaatagaggacaaaggaggagtatttcctttttcccagggtcttgacttcatgtaccaacagagtttagatagcatggtgataatttattatttaggtttaaaacgcacacacacacacacacacacacacacacatgcacacacccctcacttgtccatttatcatcaaccatgtgtttagtgcttactggactccaaagtgcagggcctgtgggtccaaaataatcaattagaccctgccctcaaggaactctcagtctggagagaagaggaaaaaatgggacaaggcaaaatgtgcaagtaatcttaaacaaatgtaataggcattatagaggcagaactgggaggaagagtagagtaggaatgagacggcattaaaagattaggagtttgctgctgtttgaggtcgggggagacaagagcagacagacaagcacaacattttgagtgatcagtgttatccaggcatgaaaggactcagcacttctgggttaatatggaaagagtctgtttcttgatttgactggccaactgcatacctcaattcacaatattactttctgtttggatatccagtgccttaaatgttcagggaattttcacagaaattctctcatttaaatgtatctaatgtgaatatcctgatattatactttctgtaatttacttgaaaatatttcagcatgtacctgtgctacgtacatgtatatctgttagttttcatccaagtcttagtggaagttggtggcgccagttgtgaatgcagaggtagggttggtgaacttgcatctaatgagaaaccctcactccagggggctctgctttaagcaactgggttttctttatctctaattgacaccagaggctttgttaattagaatagtttatgttgaggttggattttagttgggaacattgtggtggtggagatatgtggattgggttagaccttttcagaggtcttccttcttttgtgttacagaggacaaaagttcagtgagccattaaggatgataaaactgaggctccaggaggaagtggcagagtcagaattgaagcattctagaaccaggactgcccctgtccgctgctctgccctgcccagtcaattatgcttgcccttggaagagtcttggtctttgatgatactcagaggcttattaaaccacacaggccgattcttttttgtccttttcttttttttttttttttctgattttttgttttgtttgtttgtttgtttgtttgagacagagtcttgctctgttgcccaggctggggtgtagtggcatgatctcagctcactgcaacctgcgcctcccaggtttaagcagttctcctgcctcagcctccctagaagctgggattacaggtgcacaccattgtgcctggctaattttttttggatttttaatggggaagggtgttcaccatgttggccaggctggtcttgaactcctggcctcaagtgatccacccgccccagcctcccaaagtgctgggattgcaggtattagccaccgcgcctagcccacaggctgattcttgattgcaaccctctaaacccagactaaagtttgtatgccttagaaccaacatatatgacacttgtagtagtttcagcattttatttcttattttgattcaagatgtgagaggtattacaaacactcaattatgagtgatgcatttatgtgtcctattcttccatctgtagataagtgaaaagtcatttaagaaattagaggtctctgtagtaaatccaagtcacagtaaagcaaacaaaaatgcatatgtgtgtgatataatgtggaactctacccccttggaagactttgcaggctgtaagaatttcatttttaatgtatttcatacaggccggagctaacaagttaatttctattgagcaaaagttttttgtttgtttttttcctggtatgttgaggtcagctaatggtcactgtggtttggagtgaatctaaatggattttttgcccttggacaaagaccaaggacaactgtaggacttctgcatggtctacctcacttaggcttcttgattaataactctggttcaggaaggcaagggcagttatgaccactttacaactgaggaaatcaaagcaacgagaagttaaatggcctgtcccactccacagaaatggttataacagagtcagagccagaactgagctcttccgaacatgagttgactagattatggctccttccgtgacaccaggatgccagagcagtgggaagtgaatttcagtggcattgtgcatatcagggtcttatttggtatggccagaaccaaacctcaagacattattacaaaataacatgaggtactggtggcaacattttcagaatttgtgcctcagattcagcaaaacttcaggaaaagcctgcaatatggcactgagctttgctgctttcagtatcaacagttgcaaacaagggaggctggggcctttagcctccatctcccagcttcaaataccattagttctatcccaaagtcatcctctataaacatgcaatctaaataaaggtaaaattcgataaaagtatcttagcaggtttttttcaggtggcctaatccctcattccaaacagcctattacccctaagtcttattaccttcagtcttcaaaaacaatcctggggtagtaatagtgtctccatttggcaattgagaaaagggagatttttggaaataaagtgtcttgggctaatattgtcagctggtctgagctcctgattggtccttctgagtccaagccctgctctatactgggttccatgtagctttagagtaactgtgggcatttacattatgggaatcttttggattcatctttccaattaagggatctagtttattataccttggagaacgtatgtgtgtaatctgtgttattttaaaatactgtagaaaatgtttggtgccaatcccgcttcagtgtggttaaaaggtggttaaaagagaaatttgcactgatgacaggttcccagtttgaagctgtcagaatccttgtactgtcaccaccatacctgacaagttgtctgggaacattggaaaaagattgctgagtgagaaacagggttgtgcgttctccgcatggctggagtgcctcagccgggtcatctgggcagacttcaccttagaggcaccttccacctttgctcactaagctgccttctgctcttaatttccttttccttgtcaattttcctcctagaaagagaaggtacagcctgttcttaagtgagcattggtatactgggcatttgtattccttacaaataaattgctaaattcttttgctgaacattcaggcttgtctggacttggacaatgtgaacaagttttcacatgggcctggtaaaccctggataagtggatcactggggttcttgactgaaagaactaaactttgtgctaaaaatgcagaccctgatcctcaaccttattcctgcatcatttcatagcataaaccaggctctggttagccctggttatcgtgactgatgtcacaaatggcagaggactctgctgtggaaatgggaagatccctctgtttcccggccctagctcacttctaaacacagtaccaaagcactgcctgaccttcttctccacttgatgataaatgccctggggatgctgtcttcttcagttttgtgcccacagggtttgttttgcacatagtaggaatttaattagtgtttgctgagctgaattgtactaattttttaaacataaatggaaagtggggcagatgaaaataacatgtggggcagcctggcagactgaatcagatggacacgactgcttctcgtgaccttgtcaagttgtgcaacttgtgtagagccagcatcatcctaaaatgaaatttttcaaggtgtggttcagtgggagatggggttgttggaagatctcatgaaagggcatgttcatgctgcccctgggaatgtgggaaagtactaaggcaattcttacctgtttctccccactttccaccctcaggcctgctggtgggtacccttgatgttgtgttggactccagcgcccgggtcgctccttaccgaatcttgtaccagactccagactccctggtctactggaccatcgcctgtggtaagcaaccacatccagaaatacacaagttttaaaagaagcgttagggttaacaactttttatcagaaggaaaggaacgtgtacttgctgaatgcaatcactggtattttagggtaattaaccgtagccatttcaacacatgaacccaaagtctcagtggcttaacacaatgaaagtttctttctcactctgatagagtcgtgttgggatcatgtggcctcctccatgtgtagtgacactctctggaacacaaggcctccaaggtcagcatacaagggaagagtgtgagggtggagcacatctgtgtttaacttccttggcccagaagtggcacactccaccttccatttcactcacacttagttggccgagactagtcacgtgggcccaacctcactgcagaggaagctgggaaatgaagagagttgtgtggaatacttggatgtactaagtatatatcctagcacagtacttcctactgagtagggattctttatttctcctgatgataatcagtaatgctgtgctgtgcttaaaatagtagtcaacaatcttgctttggctggtccgaaggtcatgagctatctccattgatcacagtcagttgcagatggaactccttttctactctttccccacttctcactgctgcacttgactagtcttaatttttttttttttcccagacggagtctcactctgtcacctaggctggagtgcagtggcgtgatcccggctcaccacaatctccacctcccaagttcaaacagttctcctgcctcagcctccccagtagctgggattacaggcacctgccaccatgccagctaatttttgtgtttttactagagatggggtttcaccatgttggccaggctggtctcgaactcctgacctcaaagcaatctgcccacctcagcctcccaaagtgctaggattacaggtgtgagccactgcacccagcaaaaaaaattttttttaatcttgcttttattggatctctcataagaacttctagtccaaactgggcaagtttttttttgttttttttttgggacggagtcttgctctgttgcccaggctagagtgcagtggtgcgatcttggctcactgcaacctctacctcccaggttcaagcgattctcctgcttcagcctcccaagtagctgggattacaggctcatgccaccacgcccagctaatttttatatttttagtagagacgaggtttcaccatgttggtcaggctggtcttgaactcctgacctcaggtgatccgcccccctcaacctcccaaagtgctgggattacaggcatgaaccactgcgcctggacttttatttttttttttaatataatttctttttttgtagagatggtgtctctctgtgttgcccagcctagtcttgaactcctgggctcaggtgagcctcctgctttggcttcccaaagtaaagggattgcaagcatgagccactgcaattggcccaaaatggccaagtttttgtttgtgtgtggcttttaaaataaccataagaaaagtaagggctctatatgaacactttttttaacttttatttttttgcctctacttgatttacaggaaagttgagcagattgttcagagaactctcatctataccaccccccatgcagagtttcctctattattaacatcttactatggtacatttgttataattaatgaaccagtgttgatacattatttgtaagtaaagtccattgtttgttcagatttccctcattttctttttctgtttcagtatcccatctggtacaacattatagttagtcggtcatatcccgttaggctcctctgggctgtggaagtttctcagattttcctgggcttggatgatcttgacagttttgaaagatactgatccagtatattttggcatgctcctcaattggaatttgtttgatatttttctcatgattagacaggggcagtagatttttgtgaggaagatcacagagataaagggccattttgtttcaccatgccaagtgtacattttatcaacatgatttatgactgcgggcctccttgatcacctccctgaaatagtgtttttttaggtttgtccactgtaaagttactctgttcttccccttttcaaagtattctctttggagggaaatcactatgtgcagtccatacttaaggagtagggatttttctctcctttagggtagactattgacataatttatggagaattctcttgcacagtaaatttatcttttctccctcatttatttatttaattatttatgtcactatagactcatgcctatttattttgtcttctgggttataatccaacattactttattctttgctcaaattgttccagctttggccattgggagctttttcagttgacttcattcatttttaaaattgatctttacttggtaggaagtgctgtgctgggatctaaaaatataaagacaattatatttggtctctgctcttgagaaacgtacagtctagtgaggatacaagtaaatagtcaattacagcccagtgtgaaccagtgccttacagttccatttaatttctgggcatccaactaaagagaggaatataggctagcctcctgcagaattagaggaggttatctgggtgtgatttcaggctgctggcaagctccattgcctgggtaattctccttcaaggatttagtagtacctgaaattctaacattgtaattatgtctttcccccccccacccccgagatggagtctcactctgtcgcccaggctcgagtgcagtggcacgatctcagctcactgcaacatctgcctcgtaggctcaagcgattctcctgactcagcctcctgagtagctgggattacaggcacgccctgccagtttttgtatttttagtagagacggggttttaccatgttggtcaggctggtctcgaactcctgatctcatgatccgcccacctcggcctccaaaatgctgggattacaggcatgagccaccgtaccaggccataattatgtctttttaaatgtattctgagatgcaaacagcccagcgaatgacaattgactataaccattgtttacacagcccatgaacgaaggcatggcttcaaggtttagagctgcgggaaaacccatctagaagtgaagaatggggattgagtgagaggaaggtgataaaggattaaggaagaggaagctgggactctgacctggacagacttaccagtgtaacctaggctcctggaagacagtgttccagtcttctctgcacgtttacccaccacagagggagcccgtagaagtgaaagtgccatctggcctgccgtagttgattgggaaagcatcacatttagttggcaaacaatctagaatcgtttcatagtcagcagatgaagaactaaaaagaaagaagttaaaagttagggagagccaccaaacccctccacctcatgacggtgtgaaaaggacgctgcagccttcttgctcactttccagcaatcccaccatgagtgccaaactgcctgcgagatcctttgcaggcagcaggtcttcagagccctcagatctctccttacagccctccaggctcggtcttcccacctcaatttctggtgatgtaaggaactggtttgtgtctcctgtgacttttcctctgcccctgagccattacctttgttgtcattgacatttataatgtcactgcctgacgttactactcctcagtctgattctggggctttgccatggtattgctatgaaacagatcttcctgtgaatactcctatgagatagaattgtatgttacaaagctgagttattcctgaattatttgctgagccaaggctaaggaacactacgctgtgaatgctgatggcataaattattgtccaaagagatgtatagttttcttttcccagtgacacttgtttcattataataaacccagaatggttttagtttttgtatatattgattacccatagagatagctccagaatttccttatggaagactgcacagaaggaagtgacaggcgttgtgaaagtggttttttgttgttgttgtgttttgttgcattttgtatttttttttgagacaatgtcttactctgtcgcctaggctggagttcagtggcatgatcttggctcactgcaacctctgcctcccaggcttgagtgatcctcccacctccacctcccaggtagctgggactacaggcacacaccaccgtgccctgctaatttatttatttatttttttgtagagacagggttttgccatgttgcccaggctaatctcaaactcctgtgctcaagccatccgcctgcctcagcttcccaaagtgctaggtttacaagtgtgagccaccacaccaggccacctattaattgttctttcttactgatttccatttaaaatccaagttactggctccttttcatgataagattttaagagcagaagcttctcccttaagatttttaaaatatatctgtatcttattgtttgtaaatttaatgttatttttcataaactacaaagttagtatggcataggaaaatatattaaaaacttctaatttgctaggattttatgaaatattgctataaaagaaacttctgcagataattgggtaagtctaaatcactgccttgtagaatccatgggattataaaacctttttctataaaccttgatcttgtcatgtgttttgtaaatctttaataagcataaattgaattaaagggagcatctgcgaccaatgtcttgacatagaccacatagagcagtagtagtgttagtggtaagtcctagctgtatgatttgccttagacttgagccacatgaaatcaggcaggaggactgttttggaccatcttactgccactgtaataagcacctggccctcggcaatatgaatcatatagaaagcggggtggaggtaccaagagttatttgatgagacattattttcatatgcctctttttatcttttttttttttttttttttttttttgagacggactcttgctctgtctccaggctggagtgcagtggcacaatctcggctcactgcaacctctgccttctgggttgaagtgattctcctgcctcaacctcccgagtagctgggattacaggcacctgccaccacgcctgggtaatttttgtttttttagtagagacggggtttcaccttgttggccaggctggtctcgaactcctgactcaggtgatctgcacacctcagcctcccaaaatgctgggattacaggcgtgagccatcacgcctggcccgcctcttttttatcttctgttagtttatccaagttggtctgaagaagttgatcgtttacatttccttgacatggagaactttaattgggaaagggagccaaaaaactttcctaaacaacgaccatttcatttcactagtacccaaaatgtggtttttattctttttggctaatatgccattatgtcaacaattctagcctacaattaagcattatgcttaatagtttgtacagtaaattctaccttttatccagccagttttgttgagctgatttactgtactctgacaattctgtctctcatggtttaccagtgaattgactattttgcacctggggctcacattggagtaaaaataggtacagatatgctaccagcagctcttgttttggatatggtgttccagaggcagcagagagtccagtccattgtcttccttggccttcagttggcacaggtagaaagccatttggctttctgcccattataaggactagaaggttctaacagtaagaagggttggttatatgatctccatgggaatatgggcacataggaatgcaggtaattccaaggatatgatctaaagaaaggagttctgtgacagctcaggagaattagaaacaaagatacagaaggagctgctggcagttccctctggatgcatctgaccttcaaaaagggctaataaaggaaagcgtggagaggatgtgtttgacggacagctcactgacaacagtgccgaacggtgccttgatttggctgtgtattgattgagtttcccttttctttaccattccagaatgtcatctggtcctagatggtcattgtgtttcagaaatgaaagatagagcagctatcgtcttgcctgcccctcttattgtagtaggatgcagaagcaaggtgaattgtccaagttcacattcctggttataactagttatgtggtgctcagaccaagttctcaggtctccccactcccatcccaggacttcttaagtggcaccatgctggcttttataattaaatattcttttagttagcggctggtaagacccagagtttaattaaagattactaattggttctgctcttattctctactgtagataaagaaaatgttgggtaatttagttgccttctgcatgaggcagacgtaatgtgaaagttgataggtatttttataattatttcttggtctgtgtaactcaaggactattctcgtatctttagaaacacagtgagttaagaaagcaaacaaaaataattgctccttttttcttcaagcaatacatgtttattgcaaaaattacaaaatatagatacataaaatgaataaaaaagaaaacaaaataccacatcacaaatcatcactttcagactttaaaaaatctccaatatactttatatacctatatatacaaatatataggtatataatatatactatgtgtatactatatatttacagtatatataaatatataacagatatgtatttaaatgcaaataaaaatggaaaataatatattgaaaataatttttatgtcaataaaatgtatttccataccatcaattttcttttttcttttttttttttttttgagacagggtcttactctgttgcccaggatagagtgcagtggcacgatctcggcctactgcaacctctaactcccagcttcaggtgattctcctgcctcaccctcccgcatagctgggactacaggtgtacgccaccactcctggctaatttttgtatttttagtagagatgaggtttcatcatgctgcccaggcagatctcaaactcctgacctcaagtgattcacccacctcggcctcccgaagtgctagtattacaggcatgagccactgcgcctggcctatcaattttaataagtagatattttatgtgaatgtaacataaattatctactcagtatgttattggaaatctagggttttttcccctactattactgtattttgaacaatcttagtgaatattctcccaacaaaatctttgcacattctcttaattatcaccttaggataaatttatggaagtagatatcttgaatcaaagaatatacatataattaaaatagcaaaaataaacaagttaaaaaaaggatatgcatgtaattaatatgtctagcctgattgccctccagaaagatagacatttatgttcccactatccagtaaaataaggatgttaactactgattcttattgccaaggctgaatgagttacctaggactctcttctcaaagtgattataaagctgtgagcatattattatgacccataagagattataagcagagttatgtcagaatcttatcagagttacacaagagggcctaggcatataatatgcaccctttgcaatcaaacataagtgttccagggcctgagaggtttgtgctaaatgtatgttagttgggcaatagttaaacagctagtttcttttcttgacatcagaagttagaaatattttctgaatcacatttcaagatgaggtctttgtgttctgctgcttatgataattccaaaagtaactgtttggtgttttctgtgttctaaggacttgacgtgtattacctgacttaatctctagcacaaaccagtgtgttaagtgttgttccttacatattacagacaagaaatctgaaggacaaagaggttaaagtaatttacccacggccccagagttagtatgtggcattgtagaagtttgaaaccaggtgtactttctcgacatggtctgaggcattaagtaatatcgcctcactcataaccaggcttcttcttatttcagataatttaacctttattcatactcactgcacttgtaaaacatgtaagaaggcagcaaagtgtagcaatttagagtgcagactttggatgtgtgcagtggcttgtgcctgtaatcccagcactttgggaagctgaggtggggaagatcacttgagcccaggagtttgagaccagactgggcaacatagtgagactctgtctctattaaaataaataaagaaatgaaaaagattattaaaaatacatatatatagacttcagagccagaaaaatctggatatgtttgacagtttttttgttgttttttgttgttttttttttgaaacagggtctcactctggagtggagcaagccaggctggagtgcagtagcacaatcacagctcactgcagccttgatctccccattcttaggtgaccccctaccttagcctcccgagtagctgggactacaggcacacaccatcacaccctgctaatttttgtaatttttgtagagatagggtattgccatgttgcccaggctggtctcgaactcctaggctcaagtgatccacctgccttggcccctcaaagtgctgggattacaggtgtgagccaccgtgcccggtctgtttgacatttcagtagttaagtgtgatgcctattcttggtaagcacaaataatagaaggcattatcattatcatcttacttaacctgattataattataactttagttagatgtggattttgaaaaagtatattttcatttgtttctaaaaatgtttcaaatcaccatgttatttttgggttttgtcttttgccctctctgaatataagtttgtaatttttctggatgtagaaagtacaagggtggcttggtaaatacagggacagattaaaggttgctccagtatatggagtaatactcttgccttcatttggtatggaaacttcaaaattatcatctttgtgactaagattatattggataaggccataatacagatgatttattcatttggttccctttatttaattagcttcaagtgcaattcatgtgaactcagtgatccacatagcctgttctgaatctgaaaatactaggtcagttgctctttaatccttggaggcttattgggtttttgttttgttttctgctatgtgatgagtggtttttatttttgtatgcacatacaaatgtacctacacatgtgcatacatacacttatgatcaatgagaattcaccattttagttattctgcaatacaggtttttctcaagttctgcagtcccagaaacaaaatgtattattcctaggaggtaggaagaaaaaaatttattatgaatcatgcatcacaaaagaaatatctgccaaatatctatcagtggagccttaaacctttgttcttaatcctcagaggccagaagtgatagaatcattttggaggtccatcttctatttatttcaagtagacttcatgactttaagatagatttcaaactagatgaataattagactaggatgatttcgtatttttcatcattgcagacaacattaaaaagtttgcccaggtatatatttagggcctctggccattaccctaaaaaactgcttgaaatgataattgttcttattttttagaagtcaatgtctaaaccttaagcctatcaagtgttctagtttttagccacagcagagtgctttaacttgcatttcctgaaggattctcatacccaacatcagggttctttgttattccagctgattacacaatcgggtcagcttgtttttcctgctgcatctctgtaaatggggcctttccagaaaatcaacagccaagcccttcctttctcttctgagtgtcctaacacagtttgttcaagctgctgggtaaatagatcagttccttgtcagggtcatgacaaaggagcttcatattatctcactttaataagttctaagacttgaattactgcagcgcatgtacttaatctgcttgagaaatggaagagccatttataaggaacatttgggattcaaacacgtttcctttggagtctcaggtttttaaggagtggtccagaaaaagtggcatttgttctgatatctctgagaggtaacttggacccttttttctggggtgagaagtggacagaagtggccacctgcttccagaagtattttttactggattggcatcttcagatggtgatggtgaattcagtcctggctcgtacttttcagtatcctcgtacttttagtgaccagaacctggagctggaacacctgtcctcactgcttctttgtgcatttaggaaagtgttcagagaatatggtgcatttgtgcagtaaatataaattttaagatacttttacattattctccccagaaagtatctgttgggtctagataggaatccatagttcaattcctaaagctgctgtttactgatagtgtttgtcttttttcttttctaaaatagcatatgatgataatgggttcatataataatacacaaagttcttctgactcgagtagtgctctcaccatgctctgccctttaccaagtcgtcacaccaggacctttacttttagagttcctgctatactggtcatagaatccagtcttctgaaactctttgtatcttaggcttggatgtagccagaagaaacttccaaaaccccttttggcagtaccgaagcagccccaaagcactgagcatgctgaaagacttgaagatcctgagacttatggtcccagcacctctcctatacatgggagcagcgagtggctggcgatgactccaaaaggccagccttttcatgtgacacaagtgaggaaggaaggacaggagacagaggacagaacaaaaacagcacaagcagaagcaataggtttggggctagtgctggtaaaggaagatagacatgtaggcattacctacctcatagcgagcagtagagaaaagagccagtggtgagaacaatgttggaggtggatggtggggattatggaaatgatggacagtgggcagtgtgggacagcaggtcctgaggcagcagaggaggcaacaggtggggaaacaatgatagtaaacctgaacttcaatgcaagattattcagatgactatttgaagatggggtgggaaagacaattagcctgtggactatataatgtcagtgaaggctggaggtacaagttagatgtttattgaaggagtgcattcatatgggcatataccatttctgctatgggagtgtgtgtgtggtggggatgtacatatagaaatgtgtgcataaagaaacctttatcctttctttatgcataaagcacacaggccaggcactgtggctcaagtctgtaaccccagcacttcaggaggccaaggctggcggattgcttgaggccaggagtttgagacctactaaaaatataaaaacaattaacagggtgtagtgagacacaccagtaatgccagctactggggagactgaggtgataggatctcctgagccgcaggagtttgaggatgcagtgagccaagatcatgccactgtactgtagtgtgggcaacagagcgtgactctgtctcaaaaaaaaaaaaggggtgggaggaagggaagggaagggaagggagggggaagggaaggaaggggaggggaagggaagggaggggaggaaggagaaaggggaggggggaaggggagagggggggagagggaaggggagggaagggagaggaggggaggtaggaggaagggaagaaaagggggaagggaagggaaaaaggagaagggaaaggaaaaagaagggaagggaaaagggggaatggaagggaaaagggggaagggaaggaaagggggaagggaagggaaaaaggggaagggaagggaagggaaggggggaagggaaggaatgggaggggaagggaagggaaaagggggaagggaagggaagcggggaaggaaggaggaagggaagctttgaaagcagcttgtgcaaagctgataggtcttatggctgatgggcttttctatccacgacaaccaaggaatagtgttggattccatgggattctgaaagtaaagtacctggtgtgataacttggtaaagggcagagcatggtgagataccagtcaagagccagattatcctggctgagccgaggctcagactctacaaggcatatctgtgatcaatgtaggcagggacagatgagaggcaaaacagagatgaattatgcctctgggtctgcagaactcagtcctgtggttcccaggagtacctctgtcctgaggtgcagtccatctgacagtgccaacaagcacagatggaacaatcgggtggaggattcatggctggcatttattctgcacagggctctctctgtgtctgccgcatgtcacagctggtgatggtggtgacctggttacagacaaggaagggctctgtatgtctgaaaaaattttccagttagtatttaaaatttttaagtttaaaatattttaaagctttcaaactccaaaatgactcattccctaaatatttcaaataggcattgtaatttgcatttgaacagtatttttgctgtccacaatgtgtcgacagacattagcccttgtgattttcatagtatttctctgagatgggtaaaggttgttgttgttgttgtgttggagtctctctctctccacagggtctcactctgttgcccaggctgaagtgcagtggcaccatcatggctcactgcggcctcaaactcttgggttcgagctatcctcccacatcagcctctgacatagctaggaactatgggtgtgtgctaccactcccagctaattttttaatttttttgtagagatgagggtatcactatgttgcccaggctggtctcaaactcctggcctcaagtgatcccctcacctctgcctccgaaagcactgggattagaggagtgtgctactgcccccagccagttttgtgtttttaactgatctcaattttacagaatttgagacagagattaagcacttgtctaaagtcacccaggtgactggtggcagagaaggaggaggtacccagctgtcccaatttcaaggtcttgccatgacattgtaggacagttatcccactgcttttacacgtggtagcttatggccatgaaagagcaagtgtggaaaatacccaggaagaggagcaatgtatgcttcagtgttttcactggactcttctccactaagatacctgcttttttttttctttcttttagacagggtctcactgtgtcattgtcaaagctggagtgcagtggtgtgatcatggctcactgcaaccttgacctcctaggctcatgtggacctctcacctcctcctcccaagtagctggactacaggcacatgccaccatgtctgactaatttttcttattattatttgtagaaactgggtctccccatgttacccagcctggtcttgaactcctgggctctagtgatgctcccatcttagcctcccaaagtgccaggattacagtcgtgagccactgcactcagctgatacctgcttttcatccttcacataagcatcccttgtaggcaagtttgatgtttagtctcaaagtaaaagaaagtacatgtgggttttgttttgcctttcctcagtgtatctgaaatttctcattctctctctctcctgaatttctttctctcattctctcagcgattttagttctgccacagttctgagtataattgcagatacatttgtgtctcctgtctttcattctttgtcaagaatcagagattctgagatcttactgatgacaaagaacagagagaaaagacactttaaagaaatcaattaaaatataacttggaaatcgaaggagaatcctgaagggtgaatcaatggaatcacaaactccttctttagttctggaatgagcagtgcatactatatgtttatatatatatatatatatatatatatatatatatatatatatatatatatatgacacacacacacacacacacatatatatatatggcacacatatatatgatatacggacaaattataaaaagccatttttctataagatcattaacaatcattaggggaatttagtccagtatctttatacccccaccctgatggcatacctattacaccctgcagctgtgagcaaaaacagagtagtgattacatatactataaagctgattgtttaagtttggaggttgctggaagagttatcttaaatgcttcttattattgaccaaaatgtgttgacttggttgaggctgcaaggatgacctcatcccattacatttcaaggcaactgtgctaatgagagccaggctgctattccctagtgatagtccattttcacatctcattcataattgaagtgagtgagagtaattttttgcccattataggaggtggttacatcagttctccagtggcataccaaagctctcatattgttgcaacttaacaactgtaacctagtatcataagatctatgttaccctgtaaagtgcaaattctagaagggaggaaaggggagggatgtgctaaactctagtccagaaaagtgaatttgagaaatattgctgccttctgatctgaaacagtgtcctcaaagcctctgcactcacctaatcaaacttgattataacacaacttgattataatattactcttgcgtttccacatccttaaatgtcttgtgtgtgtgtctcctctggaggagagaaagcatttaaaggcaaagctcttggtccgatagtctcctttgatggtatagactataatgaaaaagtgagcctggtttttaaaatatctttggcatgaaatctgacatgaattattattttcatttgtacaggtggttccaggaaagaaatcactgaacactgggaatggcttgagcaaaatctcttgcagacactctccatctttgaaaatgagaatgatatcaccacatttgtgagaggaaaaatacaggtagtgggataaaagaaaaacattttaattggaaataatttcaaatttacagaaatgttgtaaaaataagaattgagtaaaacatacctgtataccctttgcccaaattcacctgttaacattttactgcatttgctttctcatatgtgtgtttgcctcctctcctgaatacttcagtgtgtattttctaagaatagggctattccttttttttcttttattgataacatgatattttacatatttctggggtacatgtgagtgttttttacatcacagaatgtggaatgatcaagtcaaggtatgtggggtagtcatcatatggagtatttattatttctatgtgttggtaacatttcaagtcctctcttctagctactttgaaatagacaatatattgttgttaactatagtcacctagtcactatggaacattagaacttatttcttctaactgtaagtttgtaccattcaccagcctctctttgttccctgtcccaccttcacaactttctgaacctctggaatctatcattctactctgtctccatgtgaccaagtttttaagctcccacatgtgaatgagaacatgcgggatattctattaaataacaacactacatttatcacctgcaatatttaacattatatgtaaatttaacattaataccagaatatttgacacatattctaattaatttcattaactggccgacttaatgccctttatagccttccccacccccactccagtacaggtaattatctaggaagacattgcatttagttttcatgtctttagtctccttcagcgtggaacatttccatagcctttccttgtcttctatgacattgaggtttttaaagtatacaattctggttttttactagaatgatttcattttgcatttcgtcagatattatgaatcgattcagttgttgcattcctggatggaatactgcataggtgatcctgtgtccttctcaagatattatttcttgaggcacatgacactcatttgcccctcattggcattatgagcccaaggtgttatatccaatttctccattgtagagttactaattttgcctttgcaaataataaacagttttctgtaagaaaacattttcaggccacacaaatgtatcactccttgtcaaaatttctgtcttgatttaggattgatccattgatgatttttcatctgaaccagtctttactgtgacagtttacaagatggtgattttataaaataatgcttgtccaattccaggcctctcccacatttaccatttggcaactattattctactataagcaagagtcttccctccatttatttattatttatcgattattaacatggaatcatggattctgtattttccagttgtttgtgtttcattactggacttaattattttggtgctcacactatcccagatttagagggagcccctacaaattgcctcctttgtccttgtcatagtctcctttatttatttatttattgagacagagtttcactcttgttgcccaggctagagtgcagtggtgtgatctctgctcactgcaaactctgcctcctgggttcaagcaattctcctgcctcaggaggtcaagactgcaatgagccatgattgcaccactgcactccagcctgggcaacagagtgacactctgtctcaaaaaagaaaaaaagggctgtaggaagaagctaaagcttagaagtgacaatagccaggagaaataagtaaaacaaacaaagaccaattatgtcaaacagccattttcctttttgtttgtattacaccaaaaatgtcagatttaattcccctgaaaccaattatgaggagggatttgctattaatgcagttatgtgtgaaagaatgtcattcatgtgcagatgaatggtttaagcattcacatattgtccaataatcaagggaaccaacaaagttatttgttttgagacctaattaacttttataaatcataaatgtaatagttaactacagatgcaaccataatccaaacaccttatgtagcattttgtgtatttcttaccagacctcccttttcttaactttttttttttttttaattagggacagagactcactacattgcccagactggtcttgaactcctaggctcaagcaatccacccacctcagcttcccaaagtgctggaagtacaggcctaagacaccatgcccggcctccccacttctaatatgcatattgtcataatagaagtctcatgtacatataattttgttctcgtctttttttcttgaccagtatctacaatattgttatataatttttagttattattccataattgactttaccatttctgtctttctagaagtcaccttagcttctagactagtggatggcaggtacaaataaaaatccagttaatacttttgttcaaacagtgtaactttacccacaggctgtgtttttccccctttgggatagattacaaaatttggatgaatgggttaagtagtttaagtatttttaatagaccttagtagatattgtcagttagaatctctgtgtgattacagcattgcttgctttcagcattttggttgttgaaattatttttcaaatataataggtagaagttaaagccttaatgttttagttttgtctttggttattatggggttgaatattttttcatgtttgctaagttaaatttctcctttttgtaaattacctgttaatattcttttgcatatttaaatttatattgaacatctgatataataggattttccaaagtcatgagaagctgttgcctagaactggaatgacctattttatattatgcgaaacctgtagaaaaacctgtagaacctgggaaggagctattctatccctgtattccataatctagtctacctggctaaaaaattatagccaactaagaaagggttctacattctggattatttccttttttagtgttgagaaagttggtattttagccttatggagactattagccttactgttgaaatgagctggcaaagccttgtctcttgatactagtatattagaccctagagtgtttctgagtgatggttcttgactgtatttactctcatatataaaagcattttctctttaaaatttcaatgagcaggccaggtgcggtggctcacacctgtaatcccagcactttgggaggctgaggcaggcagatcacctgaggtcaggagttcgagaccagcctgaccaacatgcagaaatcaaaaatacaaaaaaattagccaggcgtggtggtgcatgcctgtaatcccagctactcgggaagctgaggcaggagaatcacttgaacccaggagatggaggttgcagtgagctaagatcgagctattgcactccagcctgggcaacaagagcaaaactccatctcgaaaataaataaataaataaattcagtgagcactctagaaatgtggtatttaatagatctttagatagcatacttctgcttatggtttgttatatgtcactcattctcacattctcctcattttgactttaggtaagagcgctactacagtgacccaggagaatagcatgttagcccacttgagggtctccaggcttctctaagttgttagcctttggtgattccctggaggcccagctgctgctttctgttagcaggttctcattcagttatttttatttactcattcatttatttaatctttcattcatagatattttttgatccttctctaaaggcactgacaactttgaaatgtcacataggccacaggtgtatttgccaactgcgaaaggcatttttcatcccttttcccttctgaattgacttctccttcccacccacgggtcccatgccctcatgctgccttcagttgtctgaagttcttaaagtaacactaccaacgcctgcttgtccctagaatagcctgggtccaaaattgagctccctcctggccttcatcgagcttaatgtctttgttctcttggtagagtgatatcagtggtaaatagaggaaaatatccttatgttagatatttttccagggaagcacattgctacttctattgctatccataatgccctccagtatgacagaggaacagaagttagcaacttggtacctaatttctcaggcattgctaactccaaaacaattgtagatttagaaatctgcaactctggattatacaataaagactaagatatggccccttaagatatcttttaatttggaaaaacaacaacatggattcatttagtaatattgaacatcttttaggtgctagatattggtgattaaaatgttcgagacattctttttatctttggaattcatatttagtggtagaaggacatataaacatgctattttctgccagcatgtaaattaagacaacatagacgtgagaatgcttagaacccatttggaattgggctggtttcacagggaaggtggtatttatgctggacctggaaaggttgacttgggaagattgagagcagattttatgggttaagattcagtgcagatttcttttctctttcactgagagcctgtggaagattataaggtgggaatactgtagtcagatctctgtttcagaaagtggccatgtgaagtaaattggagtgtggagagtgttgtcaggatgccatttgagaagctattatatagtaattcctggactgtgtagagggactttgggatgcttttgttagaagaataggataaagacttgtcttggggctgtgcttgcatcgtaagcccaccatttgctgttatgattattgtctacatgcttacttttaactagaataggacagtgacagagattatagaagactgaagccctttctcctgccatccactcagcagcatcacaactaccggcaacagggtgaaaggtctgcagtggaaataagactcaggaaatgatttcaatacataatgcagagagaatcaacattacttcatgtggggggaaaagaatgatagttgagaaaaggctcacaagagactttgagacttggtaggattcacgaaacagaacagtctgattccagatttcaggcatgtagaatgggagggccataggcaaaaaggtgggaaagtgcagaaatgacatgttcaggccccaagggtgcctcaggctggctggagcacagttactaacgggacatttgggtaggatgtagtccagtgagaaaaagttgcggcattggttggatccaaaaatgtacatgggtctaggctactctgggcacactgcctgtgggttaccctgcttcacaaggagcagccagtctgcaataaaaataaaaattaaaacattaaaacaaacaaagtgtacatgatctagatttttggactttatactggtggtggttagaaaccactaagtattttggtaagaattttgtggtcaaatccattttaggaagacaaatttttagggagcatcaaggatgcactagaagctttaagagcccaaaaagcaggaattctaggtatgaggaggcagttgcaattttctatccttgggctacagagagctcagtcatgtcaatgagaatctgagaagttggccaaggctacacagatacagtgatgcggtgggagcacgaatctaagacttgcatgctctaaaggtcatgcattttcagttctaccttgagatcagagaaaatgaagatgaggcgggagggatttgaggattacaaagtcaaaggtggaattcaagggagcattttccatcgagatatatgtagaagccaattttcagggaattacagaggaactgggtaacagtgaaatggcttctcaagttattataatgattgaatggtagattaacctggtcacttgctatgcagatgtttcatttcctgtctaactgtccaaaaatcctgcatctaatataatttttgctctcatatctaccccttttctgctcagatgattactcgtttttccctgtaggctccccagtgttattcatggccctgagacagtgagtgtggagctgagtgtcagttggtgacatgtgtttggtctttctttcctcactggctcattcatgatgaatttttattaatcttggagaaaggcagaagttgacttttgagacaattctaccataataagcttagtaaaaacactaggactagcaaaatctttgtatctcttcatttgtaaagtaaaactataggcttcattcctagtaaacttaacaaaataaaattagcaccaataaaaatataataaaatctatattatgtgaaaatattttagtacacaaatactactcaataattggcttagaatttgggggttgccattgaagggcattcctcaatttttttttttaattctagccttagaaattttttcttctggaatatgtacatctctagtcatattaataccagttgtgtgctttgtgttttattccttattagggcatcattgcagaatacaacaaaatcaatgatgtaaaggaagatgatgacacggagaagtttaaagaagccattgtgaaatttcataggctgtttgggatgccagaggaagagaaactcgtcaactattactcttgcagctattggaaggggaaggtcccccgtcagggttggatgtacctcagcattaaccacctttgcttttattcttttcttatgggaagggaaggtaagtcatctaaaatttcagcaggaaactttggaaagtctactgaggtttgccctgaactcataaaccacatcaaaatatcagaaataaatctatagttataactaagtcaatactaatttttttttactactgaagtgaatttaattatttttcagttcaaaatggtcactaagtaataaagattcactaaaggtgtaattaattcagtagacatggattaaatctataattctgacctcagaattcacatggcccagatttacctcttaaaatgaacaagcaaaacaaatatggtattataaactcaaaggagttcagtgggatgggggagtggggttgtgagactgcaatatcttgaaagcgttttcaggaatcagatgttgacccaggcttgttccttgtgctcagcgaaactggtcatccggtgggtagacatcactcagcttgagaagaatgccaccctgcttctgcctgatgtgatcaaagtgagcacacggtccagtgagcatttcttctctgtattcctcaacatcaacgagaccttcaagttaatggagcagcttgccaacatagccatgaggcaactcttagacaatgagggatttgaacaagatcgatccctgcccaaactcaaaaggaaatctcctaaaaaagtgtctgctctaaaacggtgggtgatagagaccttgtatcttccagactttagaaatgagaaactcactcattcatttattcagtgtaaccttctctgacgatcttcaagggttctgaacactcttctgtgtatagatacaaaactaaaaaagactagctgaggtgctaccagttcagaaagtgagacagacatgacctgctccaacacaaggcagcaggcactcttctggtcctgtgaacacagtgctgtgggtgcacacatggggagtgatagcctcagcccagatggggaagagtgggtaagaaaggcctctcagtggaggctgctttgagctgggctctgaagaggtgatagaagttacctgtgcaggtacatatccatgcctggatatttcaagcagagggaagatgacgatgggggaaacacaagggaaaacacagagagaagtaactttgtcacatggctagtaggtggcagggcatgggatgaggagaggctgcagagaagcctcaaagtctgaatgtgagagcagagctagagagagggtgatggaaagttgatgccccatgtgcctggaattacccttcatcaacacagggaatgagagaaggaagagcatgtccaagggatacgatagctcagctttgattatgttgaattgaggtgcctgtagctcatctaagtagagatcagtccagtaagatatacaaaattggaaatcattgatgtgcatttggtagttgaaatctaaccagaggtctttgtaattaagatgtccttggtgatttgagacatgttcaaaagagcagtgtaagatagatgctgctactgcagcggatcaaataaaaaataaaagacaaggaaagggaactaggcaaatacagacttcattttcaagaaattcagtggtaaaggaggggaggattgcttttttttttagaatgaaaaagatttgaacatagtatcaaatgaaggaggcagatgggaagagcattttggtgagggtaggtgtggagacaggaagggacatagagatagttataagaaagttgatcatttaagaagtgatattttgtagagaaagcatggaaaggatgcttgtgtgtcctgatataccttttcctttggaatggagaggaagtaagagtaggtgaggatggaggtgactttggagacagaagggaaggaattggagggggcttctgcatcatggacctttgctctatgaagtcagagactagaccatcacgaggctgatgtcaggtagaagcttgaggggagaggtttaaacaactgacatgatgagcaagaacaaagaactcattagagaaaagatagtagttaacagaagacccagctaaggtcagaagccatagttgcccaaggtgagttgttcctgtgtcttttcctgcagctttgttgtcgatttggggtggacactgaggcccagtggatttatatggctggtttgcattctcattaggtcttaaaagataaggccccccctaaagtggcttggataagagtaaatgcagtgacctctttagagtgtattgcatttctttagaaagaggaagagtttcctgttcaggcttatttttgctatgattctttaacatttacagacatggattataagtgactatgcaagggactgaaatataataagataattttattacgcttttgggtcattaggttggggttaacttcaatataaagaaagctgagaagcgggggatgagtctagcaagattgaggaggtggaaaatgggctgggggaacttccgctgctgcataatttagaaggtatggaaacatttttcttatgtgaattgtaattattgctttccagtgatcttgatgccagggcaaagagtgagagataccgtgcacttttccggctgcccaaagatgaaaaattagatggccacacagactgcactctctggactccatttaacaaaatgcacattttggggcagatgtttgtgtccacaaattacatctgttttaccagcaaggaggagaacttatgtagcctcattatcccgctccgtgaggtaagtatctgataaaaattgatattttaagtttcatttgtaatacttttctgggtgaaccaggaataatttttttaccaacaattggcttttgaacacaggtgaatgttcatgcgtctttggtggcacctgcattctttcatttgttgtcactgctgtgactctgggacctgtgagatctcttcttccagaagctgcatgggggttttttaatgtaggttttgtttttattttattttattagagacagtctcgctctgtcacccacgctggagtgcagtggcatgatctcagcttactgcaacctccaccctccaggttcaagcgattctcctgcctcagcctcctgagtagctggaattacaggcgcctgccaccatgcccagctaatttttgtatttttagtagagatggagtttcaccatgttgggcagactggtctcgaactcctggcctcaggtgatccacccaccttggcctcccaaagtgctgggattacagacatgagccactgtgcccggcctaaatgtaggttttattacaattcaagcttaacgaggccagcaatcaggggatgagtgctattgaaatagcttgttttatgcacagatcctgaaaggcaagggcatgccacgcgatgtgctgggccacacgtggaagcaccatggtcagaggaggcaggagggaaagaaaatgtgggcaagatcctttatgtgatttcaagggaagaaatgggctacgccgagtaaataggcttaggcttggataattggaacaattttggtgggctgtggggcataggggttgtccctagttgtccatgggttaaaaagggcaaggaaatagtagtcttgagtgtgagcattcaataaaggaagtggttgaggtgtgggctccagattggttgatttgctttgaaagcaattttctagaaattggctagccctgggaagggtaatccctccagggtcagcaaggcccccaagatgccaaagcatcaaatacagaaactaggaaacatgtttattgtacctggctcaaggtctgagggcaccctggtctaaaggagacagtctaggttgtgagtcagaaagccacgtgtttgttgggctctgctcggctgatttcctgtgttagaaccatcatgctgctgcttacaatggtagattcctgagtccatcccagatcttctgaatctgtatctctgcaagttttagatctctgttttaatacatttacaggccaattcttatgcacagtaaagtctaagaaacattattattgttctggggtggaggtgggttccatcctaactccaggatgatagcttactctggtacttgtctggaagctttgctgtgaggcttggagttgacaaagaccccaggttaggatgtcagagaaagggcagtgcaggggccagcagccctgcagtttctaacctgacctcttccaacctaccctggtcctttctggaagctaaggtggccagaggctttgggtatttgatcaggattgtccccttgctaacatccctttagcaaaggattcgggtttctctctgccttctttatctttttctttttttttaattaggcatagtttcttcttattttcttgttttaagagtaatatatctttatcccagaatttgtaaaatacagacaaataaagagaaaagtccgccctagttccactgttcagagaggaccactgttaacattctattgtacagctttctagttttttctctgcattgctgtgtatgtgtcatttatataatttagatgtaaaacactttatagggaatttttatttttagttatttcctttaacattgagtatatcttaaagtgtccttcaaatcattaaatattcttctataggccagatgtgatggctcacacctgtaatcccagaaatttgggaagccggggcaggaggactgcttgaggccaggagttcaaagaccagcctaggcaacatagcaaggccccatctctattaaaaattaaaaatttaaaaaaattagctggggatggtgatgtgctcctgtagtcctagctacttgggaggctgaagtgggaggatcacttgaacccaggagtttgagatcacagtgagctatgatcgaaccactgcactccagcttgggtgacagagcaagaccttatctctaaaaaataaaaaattaaaaaaaaatatatatatatatattcttctacaatgtaatttttttttaagagataggggccttggtctattgcacagactagacatgagctcctaggctcaaatgagcctcctgccttagtcccatgagtagctgagattacaggcatacaccatcacattcatatcacaattaaattttaaatcctgcagtttattccgtaaagtatatacataatttattcattcggttacctatggttggacctttccgttgcatctagttttctctcaaatatatgtataattttctttaagttataaatagcaaacagaagtcgaactgtgaatcaaaaagaatgaaaaatgttaggcaactgacaaatctagctctccttgtcgtagggtcaactaattggagttataacacattttgaggccaagatatgttgtgggtaaattctgacaggaataatgtaacagttttacatttgactgtgaaatgtattttgtaagttttttcaccaaatttaccttcttagtagtttttgctataggatgttactaaacataattttcttcacccaattctgaatgtaattttcttcatcatgtgctactcaaatgtagtaaagcagcattacctgtaccagctagggaaaccaattctgtgattcagaataccataaatgtgctatttatgacctgaatgaatcatcactctcagtttatccagagggaaatgaggagcagagagggtctggaagccgctatcaagacatctgctgtcctgctggtccttctggcttccccctcccgggtgttagagccaactagctctgtttacattttagtgcgatttagagtacactgttgagatcttggaggaattgagagaatggtgattaatattctcaacctctattctgcttgctagttttctctagtagagcagagataataataaatatgactatatttcagggtaaatcagaagagaggcagtctgcagaggtagcatttagaaatcaagcttgttgtggttggaaggcgcagctttaaagaagcgctcagtgagacggcagtgccttttctttgaactgatgactctgtgatgtattaatggtagagccccaccccaactaatggaagaagcaaaagacttaatgtaatttttattacctttaggtaatgataatgtcagaagagcaatgggggcacccccaccatccatgtggggtctgagtggagggtgccctccacgtgagctgggtacctttcagaaccgagtcaggctgcttgacatccctgggaacattacatcctacacggaatgcccacttttaagattgtatagaccaagaattgttgtttcacttaatttttttaaataaataagctgaaatattgactggaggtttttaacacacattctacatattgacttaaggtagacccagtcaacagatgttaagcatttatccaggatcatgttgctatagattttgaagaaattattaagccagcaagagaaggaattttttttttttttttgatatggggtctctcacacagtcatccaagctggagtgcagtggcacagtcttggttcactgcagcctcctcttccacctcctgggatcaagtgattgtcctgcctcagccacctgagtagctagaattacaggcatgcgccaccacccacagctaatttttgtatttttagtagagatggggtttcatcatgttggccaggctggtcttgaactcctgagctcaagtgatctgaccacttaggcctcccaaagtgctgggattacaggcgtgagccacgtgcctagccttttttttcattcataaattactttccagtgtttcatattaaacaccaagacttgattaagttgcagtctcttttataactcaaattggtcatgaaaatatgtctcattatattgtagcagactctaatgtaattgttctcctttcctggtggcggggagcttatgtgatagagttctgctagaactcatttatcagtgagaaacattttataagccgtctgagcatttatatgttttatgtgggagctttcttgtttctgcatacatgctccagctagacgaaggaatttttcactttgactttatcaagatccacatagctaactgcgttttagacacataatgtaacctttcatctccttggcattttccatttatcccagacacctcatgaccaaaagagccagtaaaaattttatgtgagaaaaggggcttttgtggattttaaaaaataagtattctttaatacatgccttaagtgttatgggaaaattcttttcaggaaaaggaggtatttccctctgttatatagcatttattgcattagaaagaaaatccttatgtacaacttcaggtgtctcagaagattcctttaatatatataaatatatatttttaatattctataatgtatgtttaatatataatgtatattatatgtcatatattaacacatatatttaatatagatattaaaagaatcatatatactctaacacatatattctgaaaacagcagtcagatgctacactttttcccttgatggaccccaggcagacctatttttttagatatgcaagagtttttagacaacttcaataggttacttagtcttgagtagggaaaacatttctaagttgtgctttgaaggaaatatatttcacatgaaaatgctaatgaacaacttaaagtttaacctgtctagactgcttgcagtagaaatgaagaagggaaaaaagatcttagctttaagtatattgtcagagctgctgcaaataaaccatttttctagtgcttgccttgagatttgttttctaatgtgctaaagagaaaagttttaatgcgtttatcctagtttctagttgatgaaaatcctattataaatcacccgtatatgtcttcagtttagagctaaatttccccaatgtggtaggcttcggcacacacacacacacacacacacacacacacacacacacacagtctggtagttcagataatgttgcaattaagctgtttacattctttacatgtctgttcagaatagaacctttaaaactttgcagtggtagaaggtgaaggatgaaaagccctggagtctaaatgaaacatttgaaggattggtggtgttttgaaaaccattccaacattaagcttggtaaaaggaaccagtatcatgggttgttttctgtctcttatggctgatgaagcagcgaggagccctctctcttatagctccatgaaattttaatgaaaatcaaataattcctttatagcaaggtttctcaaccttggagctattgacattttgggacaggctttcgttgtggtggagtgggatggcaggggctgtcctgtgtgtcgtaggatgtttagcagcatcccgggactctgctaccagatgccagtagtatccctctacctgtgacaacccaaaatgcctccagatgttgccagatgtctcctgagaggaaaaaagtcccattttgaaccactgatttggaaaaaccagcaagacggttccagtttctagtataagctccagtttgattgttttgagctgttttattttactggaacagagtcaaagagtctcagttttgcttcaataaaatataggtggttcctatagaataatgaaagtgccgccttcctcctttagtgctgcatataggctgctattgggtaattcttggaaaataatgctctttgtttcccacttcttttcaggtgacaattgtggaaaaggcagacagctccagtgtgctccccagtcccttatccatcagcacccgaaacaggatgaccttcctatttgccaacttgaaagatagagactttctagtgcagaggatctcagatttcctgcaacagactacttccaaaatatattctgacaaggagtttgcaggaagttacaacagttcagatgatgaggtctgtgggagacacctgaaagtatttttggtttatcctgttcctgtgcccaagtgtgttcagttccttgcccattttgtttgatcttcaagctttgcgtctgacgcccaaagcaatatctcagcaatatctcatttaaatctcaaggactttgtatttggggtcatagatttagaaggaaccttatagatcacctggaataacacttttattttatagttgaagaaattcttaagtaatctgttctagttacatagcaagtgactcaggtccatatagtgacattgttgagaatggtacagaggtcactaaataaagtctcaaacctgaaatacaaatcattatgatgatttttattatgatagaatacatattgggtccctgtggaattcttccctggaccaacattcaggaacactggaggcctgaaaagataggtgactatctgaatggttagaggaagttatggcagataaaacatgtttcgaaggtggtaagctcacacataacatctctgtctctgttcacctgctccaagcttatgtggacatttttgaggcgccagaaactcaatggggtgatgaggctgccatagctgctgattcaaccatgacatgctttgcatacatgcaaatcagagaaacaaatggccaagcactttgttgcaaatatacatataaaacatgaagattcagaaacctattgtgagcattgaagtgctgcggcctgggacccagccacctgtctaatccctgccaaaatgatggcttgctgcttttctcgtgtttcttcacatagcaagaaacaccatgggaaaaaaatgatgtagcttttgataaccatacagaagacactgaagaagtaggttctattgcccgtgtcctcccaatgtcttgttcctctctgtattgacaggtgtactctcgacccagcagcctcgtctcctccagcccccagagaagcacgagctctgatgctgatggagagcgccagtttaacctaaatggcaacagcgtccccacagccacacagaccctgatgaccatgtatcggcggcggtctcccgaggagttcaacccgaaattggtgggtgcctctcacttttccctgaaactttgtagatttgaacaatgccattaacaatattttttactgtaagtaaattcacacatgcctatgtaaatggagattttcctataagttaagcagatttttgtctaaatatgttataactttcacagtggcttcatggaaggagatgagttatagagggtacaggtgacttcttttggtcttgttttgtttttaactcttgcttaagttaaaccaacaaataaatacccgatttctcagcccatatttaaacatcattaacttactttcacttgggggtgcagacataaaaccataaatacaatctcaggtaagtaggattctgactctgggcccaaaagcttcatggcagagctgtaggccatgatagatgtataaaactagagaagaactccagaaaatctgagttcctttttctcatgacttctttctggaattgtcactccgttcagcagggaacatgttctgaccttccatcactcttctcttaccatcctcagggtactttggatgtcataatgtttcattatccctttcaggccaaagagtttctgaaagagcaagcctggaagattcactttgctgagtatgggcaagggatctgcatgtaccgcacagagaaaacgcgggagctggtgttgaagggcatcccggagagcatgcgtggggagctctggctgctgctgtcaggtacggccgctgggctgggaatgctggcgtcaaagtctgtgggactccacaccagggcctccctgtgccttcagtcatgcctcaggggttctttcaaatatgcatcccccagttgaaagctacatcatgtttcctcaccagagtattgaagttcctcaattattgttccctttgtaaaactataggacccataggaagcggaccaaatgttgaatccaccatccttcgagtctttataaatacttccatttcttcagtcaggctatttaggaataaaagagaacctgaagtaaaagaacagaatactttgtgacttcagtagttcttttttccttgcccagctacgtcaacttcattgagaatgtttaagtgtgacacttcctcagagcagtcatcgggtggggaattgggaggaaagaaataagaggaataaaaaggcccaggtgtttgatttttgccacctcctgaagtctttggtcatcattggaaccataaagatgaggccagagtctgcactggaaataaaagcttactcagatcataccttgtacttcaagccagagatgccaggaaggacagaaggggacacttccatggaccagtggtgaagaggcatccatctttactggtccacagacctggctcttgtgcctgtccatcattctgtcacatcagatctttgagccctgctacagaaaccagagatccttcaggctaagctcacactgcttcctcccatccgaaagcactgagtgtatcccagggatctctaatatctcagacatcagagcactccttagtttcaccaactttactttcacatgtaaattagttgctctatctggattgaagcctgaaatattatcattctaaataggcttatgtgaatatttttatttgaacctaagatggtctgacacaaatgctattattaaaagcttttattcttaaaaagtgatactaaaattaataattacgactcacaggaaagcctttaaaaaaacctatagctctttgtaaaagtagatgtaatgcccataatgagatgtataaatgtctcagaaatagggacgtataatcctgaaaaataattggttttgtctatttcatgtaaaactagtttgttctatatttatttaatacatgtcttatttttcatttttctttccttctttctttttgtagagataggtgtcttgctgtgttgcccagggtggtctcaaacttgtaggctcaatcaatcctcctacctcagcctcccaggtgctgggatgatagtcatgagccactgtgcctggcctcattttccctaagtggaccagccatagctcctcatttagaaacctaaatttgagtcaactcatctctaattataattcaaacccaagaagatcattaccatccagtcttttcttgtcttccctgtgtttagtgaactagtcaccttgacaaccagattcagatcactgacagagtaaacagatttccattttcatcctccttgttcaaattagaagttatttatagctgcattttaagtgaaaatgaaactcaaaacgagtaccaggaaactagtgtatacaacaatagtacacagccctatctcagagataatgttgagagttagacccagtgtttcctttaacggcagatggaccatgtgagaccgcagggtggtctccacacggccctctgttggggtgataactgagcccgtatttccacatccaggaatggggttcgcctgaaggccagcctatcatgaagagagcacagctccaggccagagcccaacttgggtctcacctgcttcctgtgacccttagggtgacggcatcatgacctgaactctgtacccgctgaaatgaaatgcaggtcagatgacaagaaatcacagtacgtctcccacatcaacagagcaaaagccagcgttatgtccctgtcagctgggttggcttttccagggccagcgtgagtggtgaggccagctctctcagtgaccatcagagacaaggccttggccagtccaggggtcttggggctccacttttctgaattatgaaatgttgagtgtttaccctgtcaatatatatatcatttatatattttttgtgatatctttattgagatataattcacaacttactagttaaggtgtacaattcagtggttttttttttttagtatattcacagaattgtgcaatgatcacaattatagaacatttttcatccccccaaaacaccccataccttttatccatttggaaaatagatataggctgggcgcggtggctcacgcctgtaatcccagcactttgggaggccgaggtgggcggatcacgaggtcaggagatcgagaccatcctggctaacaaggtgaaaccctgtctctactaaaaaaaatacaaaaaattagatgggcgcggtggcgggcgcctgtagtcccagctactcgggaggctgaggcaggagaatggcgtgaacccgggaggcggagcttgcagtgagccgagatagcgccactgcactccggcctgggcgaaagagcaagattctgtctcaaaaaaaaggaaaataaatataaactgtttggaaatacagactggtagttccattcccctcaagccccctcccagccccaggcaaccaccagactactttctgttgctagacattttgtataaatggaagcatacaatatgtaggtttttgtgactggcttctttcacatagcatactgtgttcaaggttccaccatatcatagcatgtatcagcatttcattcctttttatggccaaatattatatcattgtatggacatactatactctgttcattcgtttttcagttgataaacatttaggttgtttctactttttggttcctatgaataatgctgctatgaatgttcatctacatgtttttgtgtgggctgggcacagtggctcatgcttgtaatcccagcactttgggaggccaaggagggaggatcacttgagcccaggagtttgacaccaacccaggcaacatagtgagaccccatctctacaaaaaaaaattttttttttaactagctgggtgtggtggcacgcacatgtagtcccagctactcaagaatctgagatgggaggattgcttgagtctgggaggttgaggctgcaatgagctgtgatcagacctctgcacctcagcttgggtgactcagcaagaccctctctcagaaaataaaatatagatttaaaatttagaaaattcaaaagtttaaaatttttttaaatacaggtttttttatggacacctgcttctatttctcttgaatgtatgaatgaagtggaatttctggttcgtatggtaactctatgtttaaccttttaaaggttaaacattattttgatttgcattctcctgaaggataatgatgttgaacattttttcatgcacttactgaccacttctatatcttctttgtagaaatatgtactcagatcctttgcctgctcttaattgggttatcttttagttattgagttgtaaaagtttttaaacatatttgagatacaagttcattatcagatttttcctaaaaatgctcccattctgtgcattgtcttttcactgtctttgatggtatccttcgaagcacaaaaaaatttaattttaatgaaatacaatttgtctattttttcctttgtcactctgctctcatgacatgaagatttacactactatgctttcttctaagagtttgtagttttagctcttatagttaggtcattttgagttaatttttttttttttttttttctggagactgagtctcaccctgtcacccaggctggagtgcaatggcataatcttggctcactgaaacctccacctcctgggttcaagcgattcttctgcctcagcctcctgagtagctgggattacaggtgtgcaccaccacgcctggctaatttttgtattttcagtagacacggggtttcaccatgttcatcaggctggtctcaaactcctgacctcgtgatacacccaccttggcctgtcaaagtgttgagattacaggcgtgagccactgcacccggccttgagttaattttttatgtggtgtgagatgcaggtgactgtctaattcattcttttccgtatggatatctagttgtcccagcaccatttgttgaaaatactattctttcccccagtgaattgtcttagcacccttgttaaaaattaatagaccttaaatgttaggatttatttctggactcttaaatctagtccattgatctgtatgtctatctttatgccagtactacactgtcttgcttactgtagctttgcagtaagttttaaaattgggaagtgtgagtcctccaattttcttgtccttttttgagtctcttgaagttgcatatgaattttaggaccagctagccaatttttgcaaaaaggacagatgggattttgataggtattgtgttgaatctgtagatcagtttgggagtttttctatcttaacaacattaagtcttccaacccataaacacaggatgtcttttatttaagtctttgtcaatttcttttagcaatattttgtagcttgcagtgtgcaactcttacatgtgttttgttatatttattccgaaatattttattcttttttgtatcctgcagccttcatgaactcattcatgcgttgttgaggtataattgacaaataaaaagtatatatatttaaggtgtattaatttgatgatttcatatacattgtgaaatgattactataattgagctagtttaccatatctattacctcacattgttcccatgattttttctttttgtctttttttcttgttttttttttttttttggtggggagagtttggtgagagaacacttaagatctaccctcttagcaaatttcaagtatacaatacagtattacattagatcttcagaacattttcatttcttataactgaagctctataccctttgaccaacatctctccatttttccccttccttagctcctggtaatcaccattctagactctgtttctatgagtttgactatattagattccacatacaactgagaacatgtattacttgtctttctgtgcctggcttatttcacttagcataatgtcttctgggttcaaccatgttatcaaaaatgataggacttcccctcttataggctgaatatagtatcccattttgtatatatgccccattttctttatccattcatctcttaatgggtatttagattgtttctatatcttggctattgtgaaaatgctgcaataaacataggatgcagatatttcttcaggatactgatttcacttcttttggatatatgcttagagtgggattactggatcataaggtggctctatttttagtttaaggaatctctatactgttttctgtaatggctgtagcaatttacattcccaccaacagtgtacaagggttcccttttctccacatccttgctgacacttgttatcttttgtcttttttatcatagccattctgacaggtatgaggtggtatttcattgtagttttgatttgcatttccctgatgattagtgatgttgagcacctttaaatacacctgttggtgatttgtataccttcttttgagaactgtctattcatttcctttgcccattttaaaatcaggttgtttggtttaggctattgagttctgtgagttcattatatattttgtatattgaccccttatcagacatatggtttgcagatattttcttccattaagttgctttttgattgcttcctttgctgtgcagagctttttagtttgatgctatcccacttgtctgatttttgcttttgctgcccgtgctattggtgtcacatccagaaaataattgccatatcagtgtcaagaagcattttctttctatattttcttctactagttttatggtttcaggaattgaaatttaatttaatccattttgcattaattttggtacatggtataaaaaaagagttcattttcattcttctgcatgtgaatattcagtcttcccaacaggaatgtaattaaaatttagattgagaggtagatacttgcatatagggtttttctgtcttgaagaatcctaaactgtaagtatctcaaatggatgattctcagtataaccctccatccccatccccaacacctgaggaacttctgtcaacaatgatgactcaccactgttaggaatactcttaccactctgcaatttgaaaaactccaagtatctccctcaatatggctattaaacccttcagagctaacacgttagcaggcagttttcagacttattttgagagacagaacctcctatttcaagtgaaatcttaatgaaaccacaataaaataaaagcaaagctgctggggttgaagagagtgatgagaaggtgaagcctcagcctggcttgttatgatgacctccccacctgtgctcctaagcagcccttcaggactgtctgtgggagttcctcagagcatggttttgtagcttgggaacctctaccttaggaaagtttttaagtagccagcctactatggagctgaaagagggaaggaggccacaggcaaattcaccagtctagccacgattgcaacataccacatctgtgatttcaccttctcttgcaagtttcctttgagaggtaggaaagtaaagcagttcaatcataagctgtagttgcaaaccaaaaggcagagctctcacgtttttgatactgtatctgttggatatatctcaggtgccatcaatgagaaggccacacatcctgggtactatgaagacctagtggagaagtccatggggaagtataatctcgccacggaggagattgagagggatttacaccgctcccttccagaacacccagcttttcagaatgaaatgggcattgctgcactaaggagagtcttaacagcttatgcttttcgaaatcccaacatagggtattgccaggtaaatgtcacaggtggtttttgctaaaaaaataaaataaaatttctattcatttggcagcaaatagtgggaaggaaggtttatggttaacagaactatcactttaccagggcctctcaaccttggcactgttgacactctggactgttaactctttgttgtatgggctgttctatgctttgtagaatgtttagtaacatccctggcccctaccactagatgctggtagaaaatccccagttgtaacaaccaaaaatgtctctagatattgccagatgtctgagaggcagaatcatcctgggttgagaaccactgcactgaatggaggagaccttcctggattcaccactgtctagctaggtgacctggagaagatccttctgatcactgtctgcctcaaccttcatcccaccctggagtaagagagggcatcctcagcaccaggcctgtcactgtggttcgccacagtgttgctactttgcatcctcttaagtaataatgtccttgaatagagcttttatatgctagggttatgtcttaatacacattaaaataagtgcttaacttagtattaagaaaagttgcctacataccaacaaaagtcatctcttgtactggtatagatgccaaaatttgggaagctccaaaataacgtgaccttagaatcaaaggctatatcggccaggtgcggtggctcacgcccgtaatcccaacactttggtaagccaaggccggaggatcacgaggtcaggagatcgagaccatcctggctaacacggtgaaacaccgtctctactaaaaatacaaaaaattagccaggcgtggtggcaggtgcctgtagtcccagctactcgggaggctgaggcaggagaatggcctgaacccgggaggtggagcttgcaatgagctgagatcataccactgcactccagcctgggcgacagagcaagactccgtctcaaattaaaaaaaaaagaaagaatcaaaggctatatcattgtagaggccttccctgaccatccagcaaaagctaaaagaggctgaactcctacttcaacacacaagtgcacgtacatgcacacgttagtctccctctactgcattattttacctctttataacttccaatttaaataaccccccacatagactagttaaccttttcatctttgttttatctaacactagcatttaggacctgcaagatatcaccactctgtcccccatcctccaatacctagtccagagcctgttacaaggtagacccctaaaaaaacctatctccgctaaatgactaaggaactggcagggaccatcatcatgtactaggatcagcaggttaattctcaagtggaatttccatgatgatgtcacttgggaacataatgagtaagacttacaagaaagagcctattaaaccaaaataccttttttgaaattgaattgtagaagcctgatgaacagttaccggtttctgggagatcaaaagaagtacaggaggtagttggcctctaatatgataaagttcatatttaccttttgatcttcctctttttaattaagaagactattaaagtagttgagtctagagtggttatgaggtatctgataatatcttttaataaactacagttactttagaatttaaatcactctcagttatcactaccatctctctccgtatggaaatgttgggtgaggactccaagtctgaaaggtttcgttgttctctcaggagagcctggagccatgtgtacctgattatagaaaccattacggaaagttacaaaggaaatgtttacctcactgaattaaggattaagaacactgagagattttagcaggttaaaagctttgtgaaatagcctttgggcaaatttttggaataggggtttgccagcatgagttcggggctctgtctggtgaatattggtgttaaggaagaccctgcacacttactggttcaaggactcaggtttttatgtttttacagggtcataaaacaaaactcagaagaatatatgacagagactatgtgtaaagcctccaaagcctaaacatatttatctcgcttttcacagaaaaggtttgccagcccttgtgagaataactgagtaattttaatatgctaacagaattgcttatattttcaactgtatttgatgacatcctctttcacttttttaggccatgaatattgtcacttcagtgctgctgctttatgccaaagaggaggaagctttctggctgcttgtggctttgtgtgagcgcatgctcccagattactacaacaccagagttgtgggtaagtggagatgcatttaacatttcaacctatgtctcgtcaagaagatgcttttagagaggtgccagccagaacactatttctggtcaccataagccaaaagagtttcagactactccagtttttcaaaatggaaatgagagaggttgaataaatataggttgtatacaaaggagccccgtggagtttaagggactatacacatacgcctgctccagaaattattttagaaaatatttcatgtgtgtgtgtcactctgacatgtgagagctacaccaggtatgtgcaccattaacacaaagagatttgataaaaaaaattaataaagaggatgggaacctacgaaatacagaggtgttgccaaaaaaaggctatctggggtggaaaaaatagaatatagaggtttattgaaagctaggtttctaaggtatttttcaggactggttttattgcaaagcaaacacctgttttgaggatttaaattattgctgttactccttgtaattctctcaaatatcagtgattcattttagcaggacaagcttttcattgcttgggttgtacagtatattgtttatgcttctcacttgtgttctttctatatttctaaacatttgcacatgaatttgattattgaaaatattgtcaaaaatgtccttacgttgatcatgaatgtgtacaacaggaatgcttttaagtttttttaaaaagtaattgttttaaaaaatgattaatctgtgggcaccatgcatccagaagtgtgatttttttttttttttaagaccatctcgctctgtcgcccaggttggagtacagtggcgtgaatttggctcactacaacctccgcctcccaggttcaagtgattctcctgcctcagtctttgagtagctgggactatacagactcccaccaccatgcctggctaatttttgtattttcagtagagatagggtttcaccatgttagccaggctggtctcaaactcctgacctcaggtgatccgcctgcctcagcctcccaaagtgctgggattattattattttttttaattaataagagtttgccagctaagctgcttaaatgtacatttggaactgtagtcatgtgttgatgttctggctgaggaaggactgcatatacaacagatgtcccattagattataatactgtatatttactgtatcatttctatgttttgatacacaactgtttaccattatgttatagttgcctacagtatttagtacagtaacatgctatacaggtttggagcctaggagcaataggctataccatatagcctaggtgtgtagtaaggctctactgtctaggtttgtgtgagtactctcaaagatgttcacatgacagatttacatgacaacccatttctcatgtctccattgttaagtgaggcatgactgtacttggatgtacatctcataccaaaccaaacattatgttgccaacaaaataactaattgtatgtcacgaaaaccttataaactggctttctcaacaacccttataattgtcatgtgattgttcttttttggaagggaaaacaggacaggaagagcccagaaagagaagatgcagccagaactaatctggtgactgagctgtgttgacaccttggtctagtaacagtcacagcagaacagtcagcagaaaggaacagagtcctgtgctagcagtcaagttgtttgaatggattctttagttacactgtgtagttggctaagctgcgcctttttgtatacatcgctgccacaggtgcactggtggaccaaggtgtctttgaggagctagcacgagactacgtcccacagctgtacgactgcatgcaagacctgggcgtgatttccaccatctccctgtcttggttcctcacactatttctcagtgtgatgccttttgagagtgcagttgtggttgttgactgtttcttctatgaaggaattaaagtgatattccagttggccctagctgtgctggatgcaaatgtggacaaactgttgaactgcaaggatgatggggaggccatgaccgttttgggaaggtattgtactaagcctaactttgaaaaccatctccggttttcttcctcatgctttctcttcatttcatgagtcttaactgatttgatggtgatcataatgcccgcttcttcctgtggctgaggatttattttcatatgctttttctttagaaattaacagaatttctttctctctttccatctttaaagaaactctagtcctttgttttaaaatgtagaacttgcagaaaatgattggagaattataatgggaggattccagtttcttctcctgtgacttctgatgcattcttcttccaggtatttagacagtgtgaccaataaagacagcacactgcctcccattcctcacctccactccttgctcagcgatgatgtggaaccttaccctgaggtagacatctttagactcatcagaacttcctacgaggtaggtcttgtctcctggctgagcagggcttaaccatgcattcgacacttccactgctgcctgttttgtgctgctataacagaataccacagactgggcaaagaacagatatttatttctcagttctagactttgggacgccccaaatcaaggcattggcaggttaggtcctggcctttctgcttccaagatggcaccttgcatgcagtgtcctccggaggggagaaataccatgtcttcactggcagaagagagagaacccatgctcataagacctttttatagtgccattaatccatttgtgaaggcagagtcttcatgacctaaatgttgcaggtgattggcaactatctgaggctggtatcaggagggtagtaggaagaatttaccaagacagttgtaagtaaagaaaagcagatttattaaggaaagcatgaaagtacattgcaaggatgcaatgggcaagttagcaagagaggagttaactgcaaagagacaaagccttgctggggattttataggatggttcttgtgctgtgtgctggagagggctttgtgcagtactggtaacgctgaggttgtagtgagctaacttgcatttttctgtcagcccagggtctggtgatagctgggcgcaggaagattatgagttatttgcacaggagacctatgtgttctggatcatgaaaaagggcagacttatagcttatctgttttgattatttatttatatatttatttattttgctttccctgggtcttgccagcccgactccttttccctaattaggactccacactaaatacctcctattagaccccactttccaacactgttgtgatggggattaattttcaacatgagttttagagggaataaaaacattgagactataggcttacctgcttccttctacattgagaactacttctacattccttctacagtgagaactactggccagaagtaagtagttctgtgctagctgacagctttggcctccagagatggacattgaatggagcctggatgtcttaatgggtctaataccatagtagcacatggcaagacaagctgtggctctccagtgctttaccattcacatcctgaagcctgatctagtagcagctcagattgaactctttgtagattaagtaggggctgttgagagtagggatggggaggctgaccttcacaaatcaatttgctttctgttcccatgctaagtacttagggcttctttgaagtagatagtctgagacacttagtatagcctgtatagcccagagtagaccagagtcctaggattcctctaaaattgcttggcttggatgggggaggatgctttcttgtccatgatgaccctggaatcagcctgatctgccgctctatctcacaacagaactaatacgctttttggggtgaaggaaccacagtgccactttcccccttaacacctggtggtttgtggggccccaagtgctcataacacttgatggtttcttcatttcctgatccttgattctctaaacttttatagaaatgatcactgagaaagcctgagtattctgctgagcgcactatgctctctacaggtgttttgtgattttgattggtgattgtcatattccagctagcaacaaagtggataagagacaaatagtgaggaatggagtgagatcagaaagtctctcttaaagtaaaaaatttagtgcttttaaaaaaaattgctatggatatagaaatcttttcagaaatgtgtgtccttaactcataataagagaaagactggtaattattttttaaaatcttcattgaaactccatatatattgaaagcaaaatactttgttttagaatcataaaagcaatacatgttcattttagaaattgtagggaaataggaagaaaaaaataaactgtatcctataagcgttttacatttcccttaagtatgtttttatacttacaacatacactttaaaaaaaagtccttctaaatacttgctctgtcattttctatgtataccatgagcattccctaatatattaaatattatatgaaggcatgattttactaaattgtattctgctttaatgaggtaacaaaatttatttacctagttcccttttgttagacatttacttcgatttcttccaaattttcagtattatatagcattctaagataaacttgtacccaaatatcacatctctgattattgtcttagaatcctagaaatgaatttacattaaaagtttggattaaaaaaattagattaaaaaaaaaagaatgatcaagctattggcacacactgtctaatttccatgaaggatgtctcaatttatgtttccactattggagataaagaatgaatgtttcaccttactgtctccaaaactatttccatatgcatttaaaaaagtcatcgccccaggactttggaatagtactgtatgatgtaagcaagagcttttctatctgtgggttgcttttctaaaggaatcctcagacctttattgttaaaagaattctggaccaaggttttgtgggatataatggggtttctcttcaaataatctgatcaatcttttattctttaattcgtagtacccccccccacccctttcttctttttctccttttttcttttttcttttgttagatgcctaggcatgcctcagtaccaagcattatcagtaccagctcacattcctttccttatttggaaagaggactaactttctagctcattacagacacccccttcccctttctctctactttcttttacttacccaccctatctaaaaaaatcaaatgtttagccaaccgggattagattgtacaacccgaccccagacaatggggaaagggtacaggggcaggacttggtgtcaggaataaaggctctcatgccctttgttcaggtgtgctctcatggcaactggccaaggaggcacccctctgtgcagaagtaaaattgctttgctaagaatcttttgttcaagtgttcaatttccttagggttttgagcgttattcctaacagtattaaagcttagtatgtggcaactcagcttttttctcaacagcagataagctagcttcatgctgaagtcagcattttgcccatttttaaagcgaaagcaaagaaattgagacaaggccaacagctgatttccatttacgtcttcttgggctgatccctaatggtggccctcaggctgccagacatcctatcacaggacaaagccgcagttcccttcctctgcctggaaagacaatccttttaatttatatcagtgcctatattaccaggtctttcagtgcgtgataactaggtttttgttttctcttctctgcttaagtgtcactactctgcttatgtttccagtggctctctaatgccttgtagatcaacttaaagagaacaccacgaactcttgctgattgtttttttccctcctaaccattaaattggtggttttcaatcctgtctgtgcattacatcacttaattttttttttaagctaagcttttaaaaacataaactcctaggctccatcccagaccaattaaatctgaatgtaggcatgaagcccaagagtacatatattttaagaagtttccctggcgattccaaatgtccggtgagggttgagattcactgcgctggatgcagaatggggctaatcactgatgtgggtaagaatctggtttgggctcaggcatgacacctgagtgttctaagatacacaatgcatttctttctgttcttcaggataattagccgtgacaattgaaacataggaaagaaatactgaaagcacattcatcttttgaaatttagttaagggctccctaggttgctagaaattagtctgatattgataacttcgcttcataaatacctcctggggaaaatctcactcattataagttcccctaagcctctgttgaaaggaattgtgtaagtggtgtgagactccagttttcttctgtgtagacccttgtgtgaagccctgcactttgagcagagtaatatagaagtagaagacaaagtcccaatcttaaagtttgattcatagactgagatgcccctcctggaaggcacaagaggatgttaataggccttaaagtgggtacacagctatcacagagctgcttcatgttcgagatgacccagcccagtgtgtttagtctgaaaagtgttaagcagggaaaggatgtggctaataaaacagaaggcacaatctgtgaagatggataggcatttatgaaagcttagagtaatgtgtctctggcttattaatgattactataatagctattactcatcgagagcctgccatgtgtggggcaaggtgctgggtgccttgtagacagctctgccatgtaaatgttaatgcattttaaggtgaaaatgtaagttaagagaggttgagctagttgttccaagctgcacagctagaaagtggcagccagtatccaaggaagagctcccttgcattaaagccaggaccaagggactttatttggattagaagagagatggaattatggatgtaccgatggtcatgaggtcaactggtccagtggagctggttagtagggagtcttgaaatcactaattgacttggaaggcatctaacagccactggagactgaagagcattcttcttgaagtacattatctctgcttcctgtgcaacaaattagaggagggggagagctgaaggaatagacaagcaaaaaagatagtgtggttgtatatgggaaagacccaggagatgcaagaaacagcatttgtctattcatgtattaacaaaatctttttttttttttttttatttgagacagggtctccctctgtcacccaggctggagtatagtggcttgatcttggctcactgcaacctccacctccggggttcatgtgattctcatgtctcagcctcccaagtagctgaaactacaggcgtgcaccaccaaggctggctaatcttttggtatttttggtagagatggggtttcaccaagttggctaggttgatctcgaactcctggccttaagtgatccatccacctcagcctcccaaagtcctaagattacaggcttaagccaccgtgcccaaccaaggaaatctttatttaagattgtataagcacctttcttatgccaggtatcatgctcagccctggggatacattatcagcactagatattttcaagcccagtatgagccaaaaggataacataatacatttcctttaacccatcatccagtcccaacaattatcaacatttttctgatctttgttttattactcctccccactttttttctttttttcctgaagtaacttaaagcaaagtccagacagtgtattatttcacctgtaaaagaatgtatctctaacagataaattcttcattatgtgtctctaacagataaggtgagtttcggcatggcattttttgctaatccatagctttgaattttaagtttaatttttaaaagtttgtttatacctcaaaagaaaatgtggacctataagttagttctcacccgttgttaatggaatctcagttataacattagcaagttttgagattgttttgttgttattgagacaaggtcttgccctatcacctaggctggagtgcagtggtgccatctcggctcactccaacctctacctcccaggctcaagccatccttccagctcagcctcctgagtagctggtactgcaggtgtgcaccactacacctggctaatttttgtcttttttgtggagacggggtttcaccatgttggccaggctcatctgatgagctcaagtgatctgcccgccttggcctcccaaagtgctgggattataggcatgagccactgtgcctagccaggttttgctgattttgaaaagtgttttttctatcctcttcatcttcctctttcttttatcaacaatgctgggaataataaaagctaccatactaattgttttacctatgtgtgcataaaagtcttacaccattccaaagaggtaggaattattttccctatattgctgatgaagaagatgagggccatcagtttttataaaatttatgtgaaatctgggacttgctatgtgtcccacttgctacatgtggctatgaaactgtgccttttctacaatgtccaggtgtcaaaagcatgtctcctttatagaggctgaactttacattattggtgtgtatataaagaaaatagaggccaggcatggtggctcactcctgtaatcccagcactttgggaggccaaggcgggtggatcacctgaggtcaggagttggaagccaacctggccaacgtggcaaaaccccgtctctactaaaaagacaaaaaaatcagccaggcatggtgatgggcgcctgtaatcccagctactcgggaggctgaggcaagagaatcgattgaacctgggaggcggagattgcagtgagccaagatctcgccattgcactccaggttgggcaacaagagagaaactccatctcaaaaaaagaaaaagtaaaagaaaatactctagagcagaattacaaattcacatgactgtggcgtcgctcatcaaggcacttaacaatggggtagggagtgaaggtggtaggaaagggtgggcttctggaactagacagctggagcctgctagagttgacagtctctttaccacctgaggcaaggaaccattgctgccagaacttttaatttttcaagagaagttggaactctttgttttatttgaagattactgttttttataatactccctgggccaaacaatattcatcatggactttctagcctactggctgcctgttcatgatttctgctttacagcaactttcaaaataaattctaggtaaaaatatagtgatactgggcactgtgcttagagttattttttgtaatttaatcagcagcatgttcacacaacagctaatagtttacatggagtattgaaactaaatgttttttgtaatttccatatttatgtgacaactgtttctctagccctttctggtagacaaaagatctcaaaagacatggcacctaaagaagcataaaatattaaatgatatatttttacgtaaaatataaatactgtattcaaatataaaatatgggcccacttctggcagagttatgagggtgttccctgatgggaatatagtcatggcgtgagactctttagagatcagagtaccctagaaagggccacccattcaacgaacatgggactccaccagagttttcttccctgaattcatatccttgtttcttcttatcatctcctgcctcctctgcccccctcaccctcttcttctgccctcctgaacatctactccccacctaacacataagtacacaggtgcagacagacgccacccccatagaagtcaagggggagtgtgtggggctgctccttcgaagctccctgtgtgtgagaatccctctctcgtctcttgggctctgcctcctgtaatgttaggcttttctatacctaaagcctcacattccatcaatttcttccctctctcacccagtcatccaaggcaaagcttcatttactatcttaagtatttggagttttttctgatcaaggaatgtctcaggtgtcactggtgctcagccttctgctaacagtagtgaaccccattctgcatactgggaaaataaccccacaaattcagaaacaccaaagaggcattttgagcataatttgatgacctagttttattttaaaatagaaataagccatagactttgcatattagaaccaatgccttctttttatttcagtaaattcccctgtggtgggcagactcattcacatcattccatggccctctggcctacattgagctttgttgttgctttgctgggtgttttttaagctgtagcatttaaatatttcaagttctctttggaggatttagaaaggaagggctgattgaacttgattgagcttgaccttgtggtcagtctcttttaaaaatctgtatctgttcttcatccatccttgtcttcccggtaacacagggtaagctttgaaggataaagtaaatcacagaaacactgcccagcctgggcaggggaactcttgttccgctcaggaatgatggtggggtgggaggagccagagaacataaacttgagacagactcatctctacctcattgctttatctgagctacttgttccttgttctaagtctgggggagagaaagggaacatctgcaggcaggatgggggaaggtggtatgaaatgaagggccacacacctatttgttggttggtatcagtacccacaggggcaaagcaacaaaaagaagtaccgtctgctttgaaaattgcctttctggccaggtgccatggctcacatctataatctcagtactttgggaggccaaggcgggcagaccacttaagctcaggagtttgagacatgtctgggcaacatagggagactccatctctacaaaaaatacaacaattagccaggcgtagtggcacatgcctgtagtcccagctacttgggaggctgaggtgggaggatcatctgagcctaggaggttgaggctgcagtgagccgtgatcatgccactgcactccgtcttggacactagagtaagaccctgtctcaaaaaaaaaaaaaaaaaacaacaacaaaactgcctttctgctcataaagatgttagaaattaaactgaaaaattagaaacaggccacagaaacattcagataagaattgagttggattacatcaaaacaaaatttttaaaatagttgagttggataagagatataaacaaagatggataattgtgtttattgtttaaggaagggaaattttagaaaattaaaataattataggctccctcacctccagcacaaattctgtttgctggaacaagtattattgtgatattagtgaactagcacttctcaaggaactggaatatgtggtgcctgagagaaggtattatatccacacctgtgtctttgttttgggtaatgggaagtgttggctgcagcatttactgagccaagttttgtttgtcctatttttagcatttaattctggcagagcccctcccaaagtcgggggagggagagaccccccccaaagtcgggggagggagagacccccatgtcattctaattgttcacattcctttacaaatcctccagaaataaccaagcaggaacttggagtccacggtttacatttaggttgggaccatttgctccagagggaagggccactgtgttctgtctctggcaagttgcagagtcctggctgaggaaggggccctgcctaacaaatagcagaatccatttctagttgatattaattagatctaagacacacggggctctttgaatgtcaggcttgtgaggaaatagctcttttgcttggcaccctgcaaaagattacaaagccaatgtttaatattagttactattattggaactttatctccaacacagttttacaaggacagctttggggtctcattttatagaggaagaaacagggtcagaagattcaactgagttgcccactcacataggtaattagtcaaagaacaataatttgaatcaaattttgtctagctccaaaatttatgttcttttcaacccagagacaaggaagaacttactgcctatgatagaatggtagttggtggagttacagagctatttatctgagcctcagaccacttgcagctcagccactgtggaactctgggggacttaattaacctctccaagccttggtttgcccattcgcaaaacagaggtagcagtctagactcactaaagttattgtaaggtgcaaatgagatggcatgttaatgtccctaacaattgtaggtacaataaaactgtctttccttctgtctcacagctagtgttttttattgatcacaggcatcctatggcccagtttgaagtaataaatccagttcttcatcagtaggcatgtaatttgcaatggatgctcactgcttttctgtttggatcaaaatacttaccttccttgaaagtttttctttcctagccaaagataaaaccccatagtgaattaaatatgattgcttttcatcattaatggcagcccctactaactcttgaattccagcttttcagtgcaaataaatattgcatcttcattgttgagaagaatctgattccacctttggaaggcacttccttggagataagaagtttcttccataaatcctgcttttgtaaggttgagacccactcaccacattgctggtggaacatggactgggaagattcagagatgtcagtgtactcttttgctctgattatctgaaaggaatgcctgggtcattcctttcaattccctggattagtccttccaaaacagaaagtaaaaggtactagaaaggcatagtcttttttgctgtaaactccaacttaggaaataggatagtttagagtccactacacagactgatctatagagtggtgctatttatagggatgtcagaaaaaaatacaggattaattaatattgattgggatatacttatagtaaaaaagtattcattgttttcctgaaattcaaatttaactgggcatcctgtatttcctatgcttttattcattgaatctggcatccctagccagttattgggtgcctactgtgctgtgcagcaagtcagaaaggtaaggtgccagggagtttccccgggatggagctaagagcacgagttctcaaatcagacgacctgggtttgaacttagctttgctgcttaccagctgtgtagacttgggcaagttaatgattttggctaaactacgatttctttgtctctgaaatggggataggaagagcacttacttcctggaatgatcatgaggaccccctaagttcagcaaatatttgttgagcacttacatgtgaatcagcactgtcctcggctcatgtcctggtcacacagtctctgccatagagtaagtggtgatagatttactaagcaaaaacaaaccaacaaacaaaaacaaatgcaaagtggtgctaaattcaagtaagaaggaacatggcacagtgaagggtggggacatactgtttctctgagcgtttattgttctggtgagatgacaattagcagagacacagatgccatggaggaccgaatacagtgctgtctgagagaagcacagagggggcagccagcagccggtgctcaggccgtggctggcagggagcctgcatgatgcacttggggaacatgaagaggccactagaactaatgagtaagaagaggttggtggtggctggtcagagagggcattgtgaaaggtggaaagagcatgaagggcttagaggccttggaattttatcccaagagaggatgaaaaatcactggaattttaaacaaaggaagagtgttgtctgactctggttttagaaccattcttactactgggggaagataatgatgcatgcctggaggaagtgcggagatgtatatagaggctctcgcaagagaggatagtggcttaggggtagttaaaagtggagatgatagcagtgggcaggggcccgcagctgaagcgcgacccagagaggccggagagtgccaaggcatttggatgcgcgggctctggtgtccagggtgaagcagaagtgcgacacccgcctgtgggcattgcagaaggatagtggcagcagtggctggctggggcctgggctggcagaccaggagcaccctctgtcactgagtaatgtgaaagagcacagccaagcagatgaggactgtgtggacaccgggccagacaccaggagtaatggctgctgggggcctggctggactgagatcaggagaagctgctcagagagagtaatgagctggctgacctggcccacgtgcaccctaccagctgtgctcctaaaggcctgaaccccaacctcctggtgacctggggcccagtgctggcaggctccggttgctggtctgtggaccccgcaacccatctggccacgcacccctggttgtcccgctcgggcagcatgtccatgtggcttgccggacacccctggggcttgggacctccatctctgcactagggcatggcccctgcgttcccacccagcctgggggctccctgctgtcgccctaccagtttgtcagggactcccagtcgggccagctgttggtcattcccagagatcacctgcctcactttgcggagctgatggagcgggccaccgtgctgcccctttgccccgccctgtactctccaggctgcagccccctgcaccaggcccagcagttgcagctcttttcgctgcagcacttcctgcagctgcaggagttcctgtacctgcagcagcgggcggcccaggccctggaactgcaaagaagcacccagctggagcggctgaaggcgcagaggagtaccaggcagagatggaggagaagtggagcaactggggcctgggggccgggggcaaggctggcctggccaccgcttgccctgggatgctgctgcgaaagccccccgcctggctgccggccctgcgagcatctatggcaaggcggtgagcccgccgccatcgccccgcgcgtcccccatggccgccctgaaggccaaggtcatccagccgctggaggacgtgtccaaggcgcctgcctacacctaccctgctacccctagctcccaccccaccagcctgcctccccactccctgctgtccaccccgggtatcacccgcaaggaagagacccccgacaacgtggtcgagaagaaggacttggagttggataaggaagcccccagcactttccaggccttgttctcagatatgccgcccaggtatccgttccaagccctgccaccacactacgggaggccctaccctttcctggggcagcccacagtggccgccgatgcggatggcctggcccctgatgtgctgctcccagctgatgggaccaagcgcctgacactctcgcccgaagacaagctcatcctcctgtccccctccaagatcccagagccgctgcgggaggacccggaggaagagccgctggctgaacaggaggcgaaggtggaggtggaggatgtggacgagcgccccgcagagctgccgcctctggagttgccgctgccactgcccgccatggaaaccatggctaccccgagccctgcaggcggatgcagaggtggcccgttggaggcccaggcgctgagtgccaccgggcagggctgcaccgagccctctgagtgcccagactttgcggaggggcctgaagcatgcgtggattccccgggccggacagaaccctgcacggccgcattggacctgggggtgcagctgacacccgagacgctagtggaggccaaggaggagccagtggaggtgcctgtggcggttcctgcggcagaggcagcgccggaggaaggcctggcccaggcggccctgagcgagccccagcccagcctagaaatgtcagactgtgacgtgcccgccggggagggagagtgcccgagactggagccccgggaggccgtgcctgtgcccggcagcacctgctacctggaagaggcaagctctgagcagttcctgcccggcctggaagacccactggctggcatggaggtggccatggagctgccccaggccaggcctctgccctccccaggtgctactggagtccaggccttggagaagcaggaagctgccgagagccttgtcttggagcagagctttctgcacggcatcaccctgctgagcgagatcgcagagctggagctggagaggaggagcaagaaggtgggaggtgcggagcgggccctggtggctcggccctcactggagagcctgctggcagccggcagccacatgctgagggaggtgctggatgggcccgtggtgggacccgctcaagaacctgcggctcccacgggagctgaagcccacaataagtacagctggatgcgcaagaaggaggagcggatgtaccccatgaagtcctccgtggaggacatggacgtcctggaactggacttcagaatgtggcgggccgaggtccagcaccagtacaaggagaagcagcatgagctggtgaagctgcagcggcgccgggactccgaggacaggcacgaggagtcccatggaagcttggcacgcaggccgtggaaacagacccacgcccccgagagccctgtcgcccgcccgcaagagggggaagaactgcaacagtagcggaaagctgagcagcaaatctctgccgacatcagatgactatgagctgggagcaggaataaggaagagacacaaagggcccaaggaggaacacaatgcccttattggaacagggaaagccagggagaggaaccagacttgggatgaacacgaggcttcgtctaagttcataagtcagctgaagattaagaagaagaagatggacagcgaccaggagcagttggcaagcaagctcgacaaaggccctctccctcaccaagcaggacaagttgaagtcacccttcaagttttcagacagtgctggggggaaatcaaaaactggcaggggctgcagcaagtacttaactccttatgacagcctgctgggcaaggacaggaaggtgctggccaagggcctccggcctgtctctgaaatcttccagagaaggtaaacacaaaagggccgccaaagccaggaagataggggtggggttcaaggccagaggccagcccaagtcggcccattccgcgtttgcctccgaagtgagcagctactcttacaatacagactcagaggaagacgaagaattcctgaaggagagtggcccgcccaaggcccctccggctagctccaaactgatgccttccctcctgtgtggcatggtggcaaaggacagcaaggcagctggcggcccctagctgaccaagagggcctggcacacaccccctcctccgccccctcccggactctgaaacctaagccagccaccagcaggaagcagtggttttgtttgctgcttcgagaggctaaggtgcattcctccttcagcgactcttcggaagattcatttgactaaggttactatctccaaacacaaaatactttctgtgtttcctagcgagagagtgcctgcgagtgagcgagaaggaagcgagtgggcgcacgggagagatggggggtgaggaggcccgtgcggatggccgcaggaaggccgccatctgggttcttggcagtgtagcctgctgtatcggccaaattatttttatttttgctttgatttgtactgtatcgttgtgataatatcgccggctagctctttttgagctgttatatggactgcttctgagtctgcatttttctccactttccttcctctccgccctcctccccctaccccgagttcctccccacccccatactcaccttttctgcccacccagagaccccaggctgtggtcaggctctctttgggcacgggcccagtgggggcttcccgagaaacattttataaatggaattctgtcatgtgggcgtgtgacttgatgtttgtactgcgattttgataataccaaactttattaaacatactgagttcatttttaacaacaacaataaaacaaaaagtggaggtgataaaaatggttgcaaattcctggggagtaggtattgataaagaggtcaaaggctcacaaaggcactctttttaaagcctctgttttaatacactcatgtaactgtttactcagatcaaaagatagaacgtgctagcaacctggaagtgccccttgtgcccctttcatatcactgtccatccaaccatggttaataaatctccagacttctaaaagcgtagatgatctttgatttcttttgaacttgatacaaatggaatctcacggaatatgctcttttgcttctgtttttttttgttttttttttttttgcttagtattatgattgtaagatttaaatatattgttctttttattgctgcaaaatagttgattatgtgatgatattgccatttctttatccattctgtgcatgagcatttgagtggttactgacttttggttaatagtgtcactattaatattctagcatatgtctttcggtaaagtaaaataaatctatatatatatagcatatatgtatatgcttcttgggggggttatatacttagtagtggaatatgagaatgttcagtcagtagatactgccagacagattttcagaacggttgtagcaactgatactccaaccagcagtatataagagttttggttgcactatatctttaccaacactcgatgctgtttgtcagctttttctttatcctttaaatatgcgaaaggaaaacaaaatctcaggaccccaaactcagtttgccaaagggaaaagttacgcttggaaattgagtcttgcaaaaagctgcctttccttttgttcctagacagatagctgcaagatagacggcctcatgtctcccaagggggcctccctcaccctgacaatgtaaattaacagctcttcacaggtacaagaccacagaagactagaaatcacccccacctactcccccccccaccccaccaccctaagataaggtcatatttgtcatcttcctctacgtttatcttatgtaaagtgcagatttactgagcgccagacaaatgcagagttgactgttccctcttccccaccttttcacacaacatgtgataccctccctctttttttccctttcccctttcttccccctgttgccccttttcccctttaaatattgaagtcctaaaaaccttccctggaaaaagtgcaagccacatagcctcctgtgacttgcatctctttcccaggcatttcctcaaccttggcaaaataaacctctaaactgattgagacctgtctcagatacttttttggtttccaaatatatttaactattgcagtcactgcttccatgggttaagcttcatactttaaccagggtttctttgtctttcttttgcatccctaagatatataaaatcttacaaattctttctctgccttcagatagaaagactggtttggcttttgacaacaaacatttagggggtacgaaggagcttgaagagatggctagctcacagtgtctgccatcaggagacacatagcatgcatttctgggccagatggacaaatgctcttgaacctactggtcaggagcagggagactcacacagggttggaggtttcttccaatcttctagtctaattgttagccttagacctttctgctagttgagaagattctttctttgaagcatttgttcatacacaagtagccttatttagcccttcttgacaaacttgatgacttaaggaaaatacatttgactctgaaatttaattcagctgctgagctgcctgagaatttccagatatttatttctgattgctcggtggctttaaaacagtagctaaaggtgtactgtaggatgcccatcatatgagaagtcatttctttgatgtgtcaagagtgtgttgcaggcattctgcagacaggacattgtgtgctgtaagagattttttcagagacaccaatattgctcctttacagaaattcggaactatccgggcagatttgattgaacagatgagattcaaacagagactgaaagtgatccagacgctggaggatactacgaaacgcaacgtggtaagtcctttaagaagtagcaggcaacctctgtcatcttccttcttcacactcctgctggctgtggattcctgcctgacagaactgaaaacaatttgaaagggaaaaattagggattttcccagcatggcactttttgagtttgtgaaattcattttgcttaatatttttataggtacgaaccattgtgacagaaacttcctttaccattgatgagctggaagaactttatgctcttttcaaggtgagttgcaaggtaaattcatgcccattcaaaggagtaaaggagttcaccttaataattcagttagttcttgatttttctgttaaattaagggataatataaataggaagctagagctgagagtacaaaactgtagtacttaatatgaaaataaacattcttataaccaatttaagttgatgttttagttaccttgcactccatataatattctagttgtttacttgaacctaaaaaaataggttattgcttcataatacttattaaaaacaatggtgatcaagtttaagttctgcttgaattattgcaaattgtgattgcctatgttaagctataaaaacacccttatgtagttagaataaagttgtttaagtgcccaaggaaaagcataattggttaaatttctgtgattttcctttcctaattcagcccctaccaatctttatttttttatttttattcttttttgagacggagtcttgctctcactctgttgcccaggtacagctgggattacaggcgcacaccaccacacccggctaacttttatatttttcttttttctttttttttttctttttttttagtagagatggggtttcaccatgttggccaggctggtcttgaactcctgacctccacctcgacctcccaaagtgctgggattacaggtgtgagccaccacacctggccccaatcttgattcttaataagaaagtattatggtcataaataaagcaaagtacaattttttcgtttggaaaaaaatatttttgtcataggtatcatcagcatcagaggttaaaatgtgataatcaacaggaaaaaaagtttaaaatatgccttttatgcaggtgccaatttcatcacaatttctaattaccatcagaactaaatttggctgttttgagaattgcaaagatagtacaggaggaaatagaaacgaacataaaaactagaacactggtattctacgtcttacagtcagaaaatgtggttgcttaggactgcccttgctgatgtcgcccactgcctgttcaccactggagggcaccactgttttatttatgttggtgtcactagtgcctggtaaagtgcactagtactaatactagagtctctgcctttgtaggtgttccaaacatgtgtgttgaattaatagataaattagtgattagttctcaatataacacagtccctgcatttttctgacgaggaaaccgaagcccagaaagatggaggcactccgggtgtccaggctggttggtggtgcgcttggtgcagcatcagcattatcaacagagtggacagtggcacccctgccagcctgcatccggcacttgagggtgcagtctctgtggtgtgccagctcatgaatattttattcgtacatgttaagcacctgtagctaattgttccacatagtgtaagttggagatccgtaaggcaggagaaaacaatgatgcaattcagatcaggtttttaagggatgctgaggaccagaagaaacgttctcagggcatgggggcagggccaggattctggggggagctaaacgaagtggaagtagcagctggaggcagcaagagcatggacaggtaagagaaaggactgtgacagcggacagaggaggctgactcggggaaagcaaaagaaggaggaccagggctggctgtacagaagtcctggatctggtagtcattgaaatcacatctttttttttttttccttctttgagacggagtctcgttctgtcacccaggctggagtgcagtgacacgatctcggctcactgtagcctctgcctcccaggttcaagcgattctcctgcctcaggctcccgagtagctgggagtacaggtgcctgccaccatgcctggctgatttttgtatttttagtagaggtggggtttcaccatattggccatgctggtctcgaactcctgaccttgtgatctgcctgccttggcctcccaaagtgctgggattacaggcatgagccactacgcccagctgaaaccacatcttaacctgggcactgctgcgctctctggtctgtgtaccttcagataacagccgtgtcatttgaaccctgagaatatgctgaggaaagcagttttcttatactcaaaaccctgccctaagggtgtgttgaaaacacaggttcctcagctgtattgaggacccagaagaacctgagactcggttggtgtcaggtgggacagagtctcttctactaaagaatccaatataaaacttcagttatggacacttcatggaatcattgcaacacttcaattggctctcattcatcttctcaaacatttattaagtcatcactatgtgttagttaccctgccagacttcttagtactttaaaaagccaatttctagagacaggtgcagtagctcacatctgtaatcccaggtacttgggaagctgaggtgggagggtggagtgctggagcccaggagttctagaccagcctgggcaacatagcaagacccatcactaaaaaatatatattttttacattagccaggcatggtagcatatatttgtagcccagaggctgacgtaggaggatcgtttgagcccaggaggtcgagactgcagtgagccaggatcacaccactgcactccagcctgggcaacagagtgagaccctgtctcttaaattttttttttaaggaagtcgatttctgggtatttttctggagatacaaaggaatgatgtagtcctcctcccaaggagcttactgcacagacttttggatagaacttgaggagaaaaggttaaagaatgcaccttaaggcagatttcatggaaaatgtggttcaggggccctttgccctggtttctcttgaactctttccaaattagcccttctgtttcaatctctgggcccatagtccccaaatgatggtctgtgggctctcagcaaggaacaagggagatgatctgaagggcatgttttatcctaatggttgtgagcaccatgaaagtgcctgcacccatgttcaggccaggttcagagcaacttggggtgcttaggaggaaatgctttgggtaacctttgtcaaccgatgtagctcaggttaaggggttccctcccggaatatatccccaacaccatgctgcccacagagggctgctgggctccactcatgctcgttcagagtacagctcaacccagcaggccactctgacctcagcttctgcctccctgccactgacacacccgcctccaccctgcagccaggaatgcagtcccaggaatgcagtcccaaagcccacggaactttgacacagtttcctttattctctcaaggtcgccttgcaaaaaacctgactggttctgctcaccacctctccttcctcctctcttccctactcccactcctctttttagctttttcactacaattcccaataaacaattgtgaaaagacattgatcttctttgctccttttctaagggagagcaaaatagaaatataacatactcacaattgactctcctctttttcagaaaccctagggaaaagagaaggattttcaaaagtaatttttctttcttcttttttagttttatttttttaagacagggtctcactctgtcacccaggctacagtgcagtggcaccatcccgggtcactgcagacttgacctcctgggctcaaactatcctcccacctcagcctcccaagtagctgggactacaggcatgtgccaccatgcccagctactttttaaacttttttttcatagagacagggtctcagtatgttgcccaggctgttctctaattcctgggctcaggcgatcctctcgcctggcctcccaaagtgctgggaatataggaatgagccactgcacctggccaaaggtgttttttttttctattaccatatttattcgtgcttatagtgaaatattcagacaatacaatatggaaaaagtaaaaacgaagtcctcctttttatgctcctcctttctcccccacctgccacccagagttaactataaatgcctgtgtggggttgagggtgttctttcagaactttctagcgcatgcttttttgtgtggtcttcctaaaaggagtggatatttctaccagagtcaccatgacctcatgaataaagaggctgccttttttccaaggccagcaacaggaagccctttgctgggtctggatctctattctgctcgccggagtggttcctacgctgataatttttctagagctattcacagatgtgtgaaattggatgaccacacacttgtaggttgaatactgtgtgactgtgatcttatttatgtgattttggtgagcagggaagcagggggttatgtatgatacatgggacattaaagcgggagttaagaaacacaaaatctcatcatgattctgctttaactggttggttaacctcatatgagccacataaagtctggattttaccattgtcacctagaaaacaaggcggtcacattacctaaattcctatctttttcaagtagcattctatttaagctaaaaaatttctttctctttatgggagttagttctaaaatgtatgtgagtgtgtaggtaagggggaagagaatgtggtgggggagagttccctttctttcttcacctacacccagtaattgaagcagaccttccagatgtaaactgcagaagtggttggtgtggaggcagtgaagggctggtcaagtggaggtgtatgtagaactaagagaccaagggggccctgaggccacagccctgccccaggggatgcacacagattcacctaaagccctttccaaactggaggatgggcgttttctttctggtatttgctgcaaaagagggtccccagtgatcatccattctttttcaggcagaacatctcaccagctgctactggggcgggagcagcaacgcgctggaccggcatgaccccagcctgccctacctggaacagtatcgcattgacttcgagcagttcaagggaatgtttgctcttctctttccttgggcatgtggaactcactctgacgttctggcctcccgcttgttccagttattagatgaaaatggagactctttgattaacttccgggagtttgtctctgggctaagtaaggacgtggtactattgcatgagttgggatgggatgctggagttgtgcctagtgttgcccatgctgccctcagggctacagaagcacaaggggaggtttgcaaactgattataaaatgtgtttttcatgaacatagtatatggataaatcgttgcctctacatcagacagccctcaacactagttaaaagtacattattagagaattcacaagacaatgaaatgccaacataaacactgaaaccacagacgagatagttttacaagagacaaatgtttgggttggtggattactactatttgacaaaaaaaaatagaatattttattgaatatattatatataattgcataaaacatctatttcatagtaaattttatatgtaatttcatactttcataaaacattatgaaatgtttttaataaaggagcatcacagcagccctgcggcctaaatggaagtcttttctctcccttttgctgggaggaggaaccttccagcaggagcaggcccagcctcaccccacacctcaccacagcatgagggcagctacctaccagctccctgtctggtttgctcactgccctgcatatgactgcctttttggactcttgttctttttataactgggcacaaaagcttcatggtagtggagcctggcccacttgacgtaaggttgagagtatagcaggcattatgccagaatgaggtaagaacaatttttttaaaattctaattgtgctactctatgaccttgggccatatgctttaaaaagaagtacccaaggaaagagaaaatgtcaggcatagagccagcatttctaaagaacgtctttaatctgtgagagttatatctagaagacataaaggccagaggaagctgatggttttttaaaaagggaagggatatatgtaggtaaggtccgttgaggttaaaacaaaaattgtataaagtactcatctatacgcttaaaagaggggacatgggagaactcgcatttatttagagtgcagatactgttgtgatactttagaacttttactatattaatctaaacaacagctcttaggtgtaataatgatagtgataactgacatttatacagcatttactgcatgcctggcattgccctaatgctttttatgtgcacaattcacatgcatttaatttgtctaagggcatgcaagtataaagtttgtgtttgattccacgtactcaagaggcacagtttgtgctgttactcttatgcttcgttacctacctgcttgctactattatctccatatttagctaaagaaatagaagctcagaaaagttaaagtaacttgttggaacattagtttttagcaaaccaataaatatctgttattgaactgaaatgagaggcacagctaatacatgctagacccaggattcgaacaatggctatctgtcctgaaagcttatccttttctcactactctgtactgaggataacaaaagggcattttttaggaagaaggaggcagtattaatttttagttacacaagtgatatataagtacagtctgcttttttaaaaagtggcacaaatcagataacactaaagacccctttgacgctatgctaatcttctttacttccagggtaattactgcttgtcatataggtatccatcaaaagagatatttaaaaaaaaaaaacctttgggcaaaaataaagaggagaaaaaagagacgggttctacatgtagaaagtgacagaaataaacaaaaatatttaatttacttaaattcagtcaactccagtaaggagaatgcttttgaaaatcttcaagaaggaaaaagagtcttgaagtccagcatagagaaaacactggaaaagaatatttagacttcaaaatgcagttgagttcctgggcaaagtaaactataccccagattagtgggagaactctcagatgtggttgcagagctgttgtcagttacattggtcagttatagttatggagatgggaaagtcaagcagaaatgagaaattctgtctgtgtttaaagaaactaaagaatgggccaggccccgtggctcatggctgtcatcccagcactttgggaggccgaggtgggtggatcacttgaggtcgggagttcaagaccatcctggccaacgtggtaagaccctgtctctactaaaaatacaaaaattagccaggcgtggtggcaggtccctataatcccagctactcaggaggctgagatatgagaatcacttgaacccaggaggcagagattgcagtgagcagacatcgtgccacagcactccagcctggacgacagagtaagactccatctcaaaaaaaaaaaaagaaaaactaaaaaatgaattctgaaaaacatgtatcagtaattttatatcaatccccagagagatccctctagaaattactaaacagatagatggtctttgtggaattagaaattaggggtttcaggctgaggcaggcagatcatggggtcaggagatcaagaccatcctggctaacacggtgaaacccgtctctactaaaaatacaaaaaattagccgggcgtactggtgggcgcctgtagtcccagctacttgggaggctgaggcaggagaatcgcttgaacccgggaggcagaggttgcagtgagccgagatcgtgccactgcactccagcctgggcaacagagcaagactccatctcaaacaaacaaagaaatgaggggtttctgtcagaagccataaattagctgtatctctttctccaacagtgcggctgaaacttagagtttataaacatagcataatgagttgtgatgcagccggtcattggataaataattcattaccaatggaaaaggtgaaagtatatggaaattggtgattgtgtaactggctgaacactgcacccaaaagtgtgatgggcaataagttcatttcaactgagagagcattcactagtacccttggacccagtatttggactctttgcagttgcatccttatttgcacgatagagttaaccatcaaaactaaatgaaacaattcaagtaaagttctagaagtgtgtctggctcaaaaaaatgttggttatgattgtcactatgattattactcattctcccctactggactcagcggacaccttgaaccatgaaggcagagtacacttactgaatgggtggggccacatgaaggtagaagagatagccaagggtatgttaggtgacaaaagtaggtttttaaaaattatgataggcagaaattataactgaacccaggtttggctgctcaccactcgaaaaacaaactcaagagacaagagtttcttgggtgggaagaaaaccaggtttattctgagagccagcaaatcacgaaaatggcagactaacatcctaaactaccatcttatgtcagtacagattttaggctctttttgtgttaagggcaggggaatgagaagcagttgggatcaagaggtgacagacaatgcagatatctgggcaccagcaggggtccgagaaggttgggaacttctttgtcttcagtcaggttataatgctaccatggatctttaacaaaacggttttttgcatacttctccttcaatatcagagttaatttttaaaactacatgattgctgtttttgcatattatcttagtgctctaaaattatcctagcctacatgcaggtaaaggtcccttaaacaaaacttgaattagttatgttggttcttttgctgtttcactgttacaaaatgattggtgaaaaaaaattgataaggataaatataagttctacttttaaagaaataattgttaaagaactacctaggatgtctgcatgtagtataatagtggtttccagcatggaatctagagtcagacaaatccaggtgcaaatcctggacctgtcacttatgaccttgaacaaattacttaacctcaataagcccaatttttcttatctgtaaaataggagtaataattgtgcccattttatagaattgttatgagatataagtgggattatacatatgaagtaattggcacagggcttaacacagagtgggtggttaatgtccgtcattattttcatgattagttttattaatcatgcaaacatccgggagtttagttaaccatgtgatcattaagaaactccactgtgagagtgtgaacagttgaattcacacttaggctatactaatggaagagtcaggaacagttcccctatttcctggagtggtcaagaggcttctgaactcattccagagggatattgattgagaaattaacatataaggtagatgtggataataatagggaaggataaacaaatcacatcatatgagaaaattgaaaaaattggaaagatctaatctgagaagataaagttggcccaaaaagataagcttgaggaagacaggacagctgttcttaaaatctgaaggattgttgtgtggaagagttgagacacccattctgttttgctttaaagagtgggataagagaaagaggagtagttctaaaccatttttgagtcatggactctttgagatctgataaagactatggacattttctttccccaaagtaacatatgaacataaataaaattttgcattttgaggggttcacggacttcataaagttgagactacaggttttaagggtcattagactaaaaattacagaagaactttcagtatttaaagaatacagcttggaatgaaatgcctctggttgtattgagttccccatctttgagaatgtttcagcagatgctggagtcctgtctcactggggtgtgtgagaggagatcctacattaagtggaaggtcagacaagataacccgtaaggtcccttccaacccagattctatgattcctatttttcttctttttccaaatctcatttatctttaggtgctctcagaatatatatttacaaaggattttctggttctagcaataaatatggactttgaggggaaaagcaacaggattcttccgattgaagctatggtgatataatgaccaataggttcagataaattaaggaaatacttaggagctcaaaaacaattaaaaaggatttctagaatgagtaatttgaagtgatatcaaaacacatcttgaaattatttctgaactctaatagttatttaagatgttgtgccccaatcacatgacctttctcattaataaagctattttattaggtgccaggcactattctaggtgctttatatgttttaacacttttagttctgacatttcgtggagtcctgacatcaagatcactggtagaatcttctattatcatctcaccttacagaggggaaaccgaggtacagagggtttaactctcccaacagtatgtagtacatgcagaggatttgaaaccaaccatcctggttcctgagctgttaacccaaacaggtcctggccaggcctttcaccacacaatgtcttggttggaatgtgtatgaagtagactttttagaggaacactaggcctggagtttattagcacatgtgatgcatttcacattggtacttatgtgacttctaggtgctgcatgccatggggacctcacagagaagctcaaactcctgtacaaaatgcacgtcttgcctggtgagtgagctacatggagcagtacttgtgtctgtaaccatgacctggcttgaagtctctgttttaggtgtaacctgatcgtcctctttttgatatacaccatcattcatgagtcactaagaactaactgaacaatgacaatttccataagttcttgaatcagcatgcacttgattgtatagtcatttacctgtgtgaagagtgagttgtggtaacagaaaagagcaggcaggcatctgcaaaagaaagaataaatagcacttggtaacacctgggatacaaggattgtgagagagaaaaggagcgtaggaacattgacaggaacaagtggggaaaatggtgaggttttttcaattttaaacaaggttggtaccagctgggatctatctagcaaatacttttaaaaatgagatgagattggcacgaacaatagaggtaggataaaactagatttgggaattctctttatagcgtacagtttcctaaaattttgttaatatagcattattccatacaacttggaaaattcttcataacacagaaaatatgaaggaacactttggtgtggggttgttaaaagggaaggtggagttagatggagttagtgacctcctccactaaggtttagagacagtaggcactcaaggccccatcccacctttgtaactttagcttttcatccccacttatgtcattttatttaataattaagcatactttcactggatcatggccctaccaatatgagaactatgtttcctcccctccctagagccatcctctgatcaagatgaaccagattctgcttttgaagcaactcagtacttctttgaagatattaccccagaatgtacacatggtaagtgacttttctcaccaaagatactatatttgttttctaccgagccctccattattggaaaaagacttgcctccaaagctagtcaatcaaagaagtatgtaaatatggttgccttaattggttactttcctttccagtttttgagattaggcaactattgggcagtaggtacctcagcccactgaaggaaacatgtacattgtttcccagtaggttaggaaacttgtgtcctatagagctgtatactttgctgccctctttctgccaggatcagcctcattaataatatcctgttaggcagccatccagaattggaactagcatttctgtcagaaagcattctcttatatctgtgtttgctctatagcagaagttggcaaactatagcccgtgggccaaatccagcccaccacctattttttacagcctgtgaactaagaatggttttttacatttttaaatggtttttaaaaatcaaaagtaaaatatttttgccacatgaaaagtatatgaaatagaaacttcagtgcctataaatagttttgttggaagacagccaagctcatttatatatgtattgcttatggctgttttcgtgctgcagaattgagtggctaaaacagagacagtatgacctacaaaggttaaaatattcattgtctggtcctttacaaaagacatatgctggctcctgctctctgtggatgataggtctacaaagatgtgattcaactcatatatgtctccaaatttatatattaattcatatactgttttgtcttacattaatctagcattgtcttttggcttgctactgcagtaagttaccttctaattcatcattaggtcaactttatcaactcacctaagtccaaaagtaaatgtaggtttctcctgggttcttttgcctcttaagttttgccatccccaaataagcacaacagagacctgcaccaagagaccttacttttagactgtaagcaccaaagtgatttctgtagagagagtgagccaggctcagtcttatgactggcaatacaagttgagggtaggagctttggacagaacactagctatgtatagtgttgtctaggtgagtgcaggcaggttcctatgtgagcctcagtttccttgtgtggagaatggagatgatagctatcatattgggtgtaattaggacctaataagagaatgtaataagacattttgcatagtgtcttagtgcatcctacatattcttaatattatatattggaagtaatggcaaaaaccacaattacttttcaccaacctaataccattagcagtcacattctggctacaaaatgttctccacacatttcttagtagacatacatctcagaaagggattctcttgttttagaaatgcttcagaaatggtcacatgccaatagcatgtaatatcattgaaatatgctttttgaagaaggttttccagtgccaaagatgctattgctttgcatggaaatgtttcaggtacgggtaaaataagtaagccaaaactgtcttagaatcttaccatataaagataactaataattcaccttgaaatatttcagttttttattcaaattgtacacatacacaccacagatatatgtatatagaactgggatcaaactacctatacagttttgtatcctgctttttttacttgaaatccagtgagaatattactttgtcattaaaatttctttgaaaatgtggtttttaaatggctatatagtatccattgcatggacttaccatacattaaatattttttaaaaatccacttgttgcctacatcattttcaacattaagaggggaggaatttcccaacaacacatagtacactttcctcactgtgtcttaaaagctactgagattaatttgacacgtaatacagtaaaggccacatctctgtctgaccagccagctttgggtggttgaagaagtgctggaatgcaccctaacagccaacaaactgcatgggaaactgagggcattgtacacctctctattttgaagtccctatgtgccctgtaatgtctcgttttaagaagacaaaacagttataagtgggttccttaaaagtcatatttttgaagtaccaaattataaatctgaagtagttttatagcatgtaacattttagcaaaaaaaaaattttctctcttctgccaacatagattttaatttccttgaaagagtgagttctggatcttttgcagggtctggcaaaaaaaatctgtctcatatatgcaaagttaaatgataatgtagaaaagacaggagagaaatcaacattcattggggcaagcactaccattttttaagtactaaaggctatgtggcattatcccattaatttttttttttttgagatggagttttgctctagttgcccaggctggagtgcaatggcaccatctcagcccactgcaacctctgcctcctgggtttaagcaattctcctgcctcagtctcccgagtagctgggattacaggcatgtgccaccacatccggctaatttttctatttttagtagaaacagggtttcaccatgttgaccaggatggtcttgaacccctgacctcaggtgatctgcccaccttggccttccaaagtgctgggattacaggcatgagccacgctgcttgaccctccattaattttttattgtacactgaaccccagctgtgagaaagaattctgcggaggtcctttacctggagatagtgttgtcagataaaattatgggacatgtagtaaaatttgaatctcagatacaaaataattttcttagtataagtatgtcccctctaatgtcagggttatacttatcccccccaaaaattgttgtttatctgaaattgaaatttaactgaatgttttgttttgttttgaggagtttttttttgtttgtttgtttgctaaatcaggcaaccctacttagagagtcttctattttccactacaaatgctaattccatggtcatattatataacattctacttttttcttctgaaccatttcttggtagttgttggattggatagcagaagcaaacagggtgcagatgatggctttgttacggtgagcctaaagccagacaaaggtaaggatattctcttctatatgtttaccttcttgctggttgtacacttgttttttggcctgtaagcacttatttcttgacatttgggttgtagggaagagagcaaattcccaagaaaatcgtaattatttgagactgtggactccagaaaataaatctaagtcaaagaatgcaaaggatttacccaaattaaatcaggtaagtgcttaaagttcaaatcattcgcttcaaacctggacactcttttttctatgactgaaaagtcatcgataaatgtagactcaatacccatcaaaaataataactggggcctttacttagtatccatttggacctattttgtgcatgtatttatgcatcaaaaatatgctccattgtgaaaaaacgacttcctcagaggaaatgtgaaccacaacatattccattttgagagtaaatgcatcttattgcaatcattaaaaataccctcagatactcgaaagacaaacacattgctgttttcagatcaccgtgcttagctataaaggtgtctgcacattttccttaaaaacctggtgaaatgaggaagaaaaaaacaatataaataattataggctgaaaatgctaagttttgtaattgaagaacagaagtcatctgggtggagactgaaagcactaaagcattacttctgtccagggagatggggcatgtgtcgtgggaggagggattggagctaaccttggaaaaattgaggtgcatgctaaagtgtgtagacgtgaaaatagatgagtctcggatttccttaagatgtttcaaaaagggaaaagagaacaagaaaaaagttactgagccaaatgtatgacatagtccttcttgactcgaggtgagctgtacatggatgtttactttttcattccaactttcatagatgttggaaaattttcaaattaaaaaattgggaaaataagctgggtgtggtggctcacacctgtaattccagcactttgggaggccaaggcaggaggatcacttagcccaggagtacaagaccagcctgggtaaaatggcgaaaccccatctctacaaaaaacgcaaagattagcagagtatagtggtgtgtgcctggggggctgaggtgggaggttcatgtgagcccaggatgttgaggctgcagtgaaccgtgattgcaccactgcactccagcctgggcgacaaagagagaccctgtctcaaaaagaaataaaaattaaaaatagaaacatcaataggagactttaaacatgtccatccagcctaggcggaggactttccagggatctttaggcgttctcatttaaatggctttacagtccacttcagtgctgcctttctgctcccccaagatttcacattgtgtttttccaaatcgcttttcaggggcagttcattgaactgtgtaagacaatgtataacatgttcagcgaagaccccaatgagcaggagctgtaccacgccacggcagcagtgaccagcctcctgctggagattggggaggtcggcaagttgttcgtggcccagcctgcaaaggagggcgggagcggaggcagtgggccgtcctgccaccagggcatcccaggcgtgctcttccccaagaaagggccaggccagccttacgtggtggagtctgttgagcccctgccggccagcctggcccccgacagcgaggaacactcccttggaggacaaatggaggacatcaagctggaggactcctcgccccgggacaacggggcctgctcctccatgctgatctctgacgacgacaccaaggacgacagctccatgtcctcatactcggtgctgagtgccggctcccacgaggaggacaagctgcactgcgaggacatcggagaggacacggtcctggtgcggagcggccagggcacggcggcactgccccggagcaccagcctggaccgggactgggccatcaccttcgagcagttcctggcctccctcttaactgagcctgccctggtcaagtactttgacaagcccgtgtgcatgatggccaggattaccagtgcaaaaaacatccggatgatgggcaagcccctcacctcggccagtgactatgaaatctcggccatgtccggctgacacgggcgccttcccgggggagtgggaggagagggaggggagggattttttatgttcttctgtgttgagttttttctttctttcttttaaattaaatatttattagtacctggcttgaagcctagtgttttcataatgtaattcaatgaaaactgttggagaaatatttaaacacctcaatgtaggtacattacactcttgttgcggggaggggatttaccagaatacagtttatttcgtgaattctaaaaaacaaaaagatgaatctgtcagtgatatgtgtgtattataacttattaatcttgctgttgagctgtatacatggtttaaaaaatagtactgtttaatgctaagtaaggcagcagtcatttgtgtattcaggctttttaaataaaattagagctgtaaggaaaatgaaaagccacaaatgcaagactgttcttaaatggaaggcatagtcagcgagggtaaatcctataccactttaggaagtattaaaaatatttttaagatttgaaatatatttcatagaagtcctctattcaaaatcatattccacagatgttccccttcaaagggaaaacatttggggttctaaacagttatgaaagtaagtgatttttacatgattccagaataacacttgtattgaccaatttagacagataccagaccaattttgcatttaagaaattgttctgattatttacgtcaactcattagaattcagtgaaaagtaacagtcttttgtcacagagaatctgaaagtagcagcaaagacagagggctcatgacaggtttttgcttttgctttgcttttgtttttgaaagagtaaaagtactgatgcttctgatactggatgtttagcttcttactgcaaaaacataagtaaaacagtcaactttaccatttccgtattctccatagattgaagaaatttataccacatatcgcatatgaccatctttccatcaaatcaatgtagagataatgtaaactgaaaaaaaatctgcaagataatgtaactgaatgttttaaaaacagaacttgtcactttatataaaagaatagtatgctctatttcctgaatggatgtggaaatgaaagctagcgcacctgcactttgaattcttgcttcttttttattactgttatgattttgctttttacagatgttggacgattttttcttctgattgttgaattcataatcatggtctcatttcctttgcttctttggaatatttctttcaacacattcctttattttattatacattgtgtcctttttttagctattgctgctgttgttttttattctatttacaggatgatttttaaactgtcaaatgaagtagtgttaacctcaaataggctaaatgtgaacaaataaaatacagcaaatactcagatacagctttttatcttt

SEQ ID NO: 201 - DNA, 760999 bp, Homo sapiens
ccgggccgctgccgaggggccctgcccacccctgcccagcccggagcccaggcgagccagcgcggcgagcctcctcccctcccgcctgggtcgtcctgagtccgcgcccgctccagttgctgcagctgctgctgctggcggctgcggggagcgcggggcgcgcgccgaagaggcttgggcggcgaggacggggacgaggaggagtcggaggcggcaaggaggaagagcgagcggaggccgaggggctcagcggcgtggcgacaggactagggggtcccgagaacatgggctagcaggcggccacgggccggcggccggacgcggtgaacctgccgcggccgggcgcgcactggcgcggcgagccggagccgagcgcagccgggggaggagggctggcgcaggggcgcccgggcggagggggccgattatccattattaacgagttaccacctaataagcggagagcggctcgttagccgcgcgggaggcgctcggggaagggggtcaccggccgagcgcagcgcacacccgtggcgcacggcgggcggcgcggcgccgaggacacccgggaccgcgcgcggagccggggcgggcccgggggcggcgcagaccccgggcgcgggcggcccgcggcgccccctggctctcggcgctcggggccagcgcagcccggggcgagcggggcgcgggccggggagggggagctgcccgcgcactccatccccctcccccccgggcgggcggcggcggctcgctgtatatatctcggcgcaccccgccaggtcgcgcacagcgccccgagcccaggcgcctccccgcccccctcccgcgctccgcggcggcggcggcggcggcagcagtagcagcaatatggctgttgatgggtgtttggggtggcgctggcggcgggaggagctcccccgagcccctgcgccggctgcccgttgctagctatggcaaatggtggcggcggcggcggcggcagcagcggcggcggcggcggcggcggaggcagcagtcttagaatgagtagcaatatccacgcgaaccatctcagcctagacgcgtcctcctcctcctcctcctcctcttcctcttcttcttcttcctcctcctcttcctcctcgtcctcggtccacgagcccaagatggatgcgctcatcatcccggtgaccatggaggtgccgtgcgacagccggggccaacgcatgtggtgggctttcctggcctcctccatggtgactttcttcgggggcctcttcatcatcttgctctggcggacgctcaagtacctgtggaccgtgtgctgccactgcgggggcaagacgaaggtaacgcgcgccccgggcgcccgccctctgcgccagccccaccgcttctcggcgtcccctgcagcccacctcctcgctccgcgccgcgccgtgcctccctccatccccgcctgccttcccctcgccgccttcccttccctcggctctcccggtgctctcggatcggggcagcgggcggcgcgccgggggtgaggagttgcccccagccagtgcgctccgggacgcggacgctcaatcctgtcctcttgtttattgtagggttgttggcggctgcggctggggccggggtcggggactcacaggctcgggtgccgtggtgcggggtggggacagccaactcagcggggacggaggaagctgggggcagctgggtgcgtgttttgcaccgctcacctgccggggctcggctcctggcggtgggcgagagggagcacatccgcccatactttaggaacctgttggggagatgagttcgtggggtcagaaagaagggaaaaatcctttgggcaagggagagaataattttgcacaagggaatcccgggggaggagcatggcccgagataacagggggacttcgaggggcgagagaagttggggagatccatcccactattgggggtagcccacggggctgccacttttggaatgtgtcgaggtcgcatatctgatgtaacctcccactccgtcccttaggtgctctagtggaacataccccaagttcttcggcctctgttcctttgcccccaggccacccactttgggtccccggaaatgccaccagcagcgcggagctggagcgggagtccgcctgaggccgcggttttacgcggagcgtcttccctggcgctcgaggtggctagatgtcgtcggctttagctattcctggtgcagacgcccaccggcactgaggctggcgacaccttcgatgtatggttgctaggctcactgcctggtctgtagtcgtgtccctagagatgtcttcccttccccacagccactggctggagtgggggacccgacactgatagaaaactgcagaataaaaaagaaagaactggaaaaaagagagtgagccagctgccttctttctgagtaattcccatcctaggggacttcacgcgcgaaccgttttggagggaagggaaatccaggggaatagtgcagggtagatacacattgcagcctccacatgttcacatcttttctagtaaagttaaaccgaggacccctcaaacttctacagggcacagcaacttgtagcagcctccttggcggctgagagaagtagggaagcctggggctatgggtgaaggctggctatgaaaacaccaggggggaaggagcctgtctctcctgatcattaattatacatcctgttgggtgctggagctcagctgtgttttgtggcagcacatttgtgttttggaaaatactggtgtattggaacaaagggagaaatatgaaaaccatcattctcttcgtcattctctggcttctccggaggcctgcaggtgctggtcggagagttttctttggaattaccttctcagccgtagaggtttcttcttatttgttaaggaggcaaacctcccaccttccagagaagccctcaggttaagcaaagccctatacaccagatccctgactagccttcctgctgagaacagcttattcctggagccttcaaattcccacattccctctctccatccttctcctccacctcccccaacagtctcgggaattttgttccccggtttactgagattcagcgactgtctttaggggaaagatagctcatagttgtgtgcctctgaaatgttccctagatagagtgatctgggtgaactttttaacagcttgctttctttcaggcagggggcaatttttatcataatgaaaactttttccatgattgaaaataagttgtggtgtttttgtgaacctggggtcctaaacacagcttccaaagtctttttatgttagggggtacataaatgcaattgcagtgtctgtaatgaaatgctaatcccatcgcacacacaaaggatctcctaaatgatgagcaagcataacttctgtcagtttactcaagaaaataggtttttggcaacgattagaaaaaacaattcgtaaatatttggctatgttttgtagccccaagacctgctgagtggacataactggaagtgagttgctgtaagaaatctgccagggatgagaggtgatggtggtttgtttggaagatgtgaggccagtatagaatgagtgcaggttccttttgataccgtaagtccattttaaagcacacctagaatctcttgatacctgcccctagatttgctcacttaagccataggtagccagctcattatatgcagtaacggtaagttaggccttttaaaagcttttctttctatgcttgaggtctgtatttttattgcaattgtgtgtgtgtgtgtgtgtgtgtgtgtgtgtgtgtttgtctttttttcttttttctttccaagtatttggtagttttgtcaagactcgatacacaggcatgtatttggcttaagcttagaataataatttttgtgctagatttcccaagaaaacataggctgcctttccagaaaattctaccagccctcagatgggttcaccctcaccctccttcagccccaagatggtttgatcaagagctggagtccagaggaaagcaggtctgaaattctgtgggagataaaattcagcaaggagctccaatttcatgagcgtttggtctctgggatcgcaccaaacctttttgatcaaaggaacccaagactgtggacatgcatcgtgggacatctcttcattagtacctttggcctctgaatctcaaacagtgaatgactttagtcttttgaaaagagtggcatgtggactttttcagaaagtgaagaagaaaacattacaatttcctcctgttgggaacttggtcacagtcattccagtactgtgttctttgctgtactttttcacattattgtttttttccttgtgggatttcatcagagctctctattcacttgggtgtgacgttgtgaagttcaatcctgtcatagactatattgaatagggagctgctctggtagcctgaataaagccatgactttgaagaagttatttaacctctctggtgtctatctttccttgtgtataaaatgtggggattgaattctgtgagttctaatgtcccttcctgctctgtgattcgatataggagagagggaggagttgaggaatgagggttaaagtttctagctcagaatgtgttttgcagttccctagcaattcctttaggaattcagccttgggacagttacatatctttatttccatcttctgctcgtcttccagcatgtggtctacttctctttaaataactggggaaactgaggccaacttcctgttggagctgtggtttgttgaggggcctgagtgtggctgggcatagagttatttccattctcagtttgagctgttggccttgtagaagcttgggcttgatcaaggatggtctgcgtgtaatgaattatcgagatgttgtctccatggctgtgcctgagaaaacaacacgttttctctgtcaggctcgtgactaatataaatatcagatcccattacagcttggtaattacccagggtctggcctgacgcagtcaatcagggctggagcttcagtgccgtggagctcttgattccagattggcccttgtgcctcatctcatcctgtcctggggattggctgcaccagatgaccttgagatactcctttttgagcagatcacttggggtggccttggaggagttcttgggtcctagtcacgggggagctccagctgacctgcccttgtccagagagctcgtgctcctcattccttgctctctctctctctccttttattaatttttttttttgagatggagtctcgctctgtcacccaggctggagtgcagcggcacgatcttggctcactgcagcctgcgcctcctgggttcaagcaattctcctgcctcagcctcccaagtagctgggactacaggcgcacgctgccacacctggctaatttttgtattttaagtagagacggggtttcaccacattggccaggattgtcttgatctcctgaccttgtgattcgcccaccttggcctcccaaagtgctgggattacaggcgtgaggcacggcgtccagcccctggccctctttatggaaatgcacactttagtacaagactctgcaatcaggcaaacccaagttcaaatcatggatctcacatttattagcagggcatctttgactgccaaccatgttgagctttggttacatcacctataccaagagcatactgatgcttactttgtagggttcttatagggagcaggaataatgggcacatagcaccctgcaaatgccagacacttagcaggcctcttgtaagtggtaactatcatagcttcatgaagtgctgagtttattttccctttgattcattgaacttatagcccctgaagggcgcagactataacaaataaagtttttgagccaaaaggaggctttagatcctgaagtatactgtcatagatcaaaaaaccatttagagtcagactgagacatgggcttatggctcttggctgttgcaaggctggaaagttagggcagggcagcagaggtaggcttcacggatggggtcctggcaggatggttacagttttgatggtggggtatcagtggacgaacatcgacagtatgggggaccaggagctgctgggctggcagaagggaaacactgtggcatttggtgggcaggtatggttgtccagcattgtacccttgaggagggacaaattccatccctgttatcccaagtccagaactcatagacctgtctcccaagtgatgtcacggtctcttggccaggacactcactgtctacccagaccagcttttccaagacaccccctaggccaggtttccccaagtgtgttctgtggcacacctgccttttaaattaccttgtgaaaaaaaatcagcaggcatggcgtggctgagcttcccctttggagggccacatcacaggcttggcggcatcctgctggtagagaaagtggttaaaatgccctcaaatgtgctacctgtgagcagtcttgcttcagtgtcaggggtgctgtgcagtgcccaaggttcagcctgtgatcctgggcaaagacgtcatgcctttgtgcctcagtttcctcacctgcaaattgaggtctgtgatagagcacagcctcatggggtggtttttttcaccaaccccattttatagcatttcctaggaggacactgagaacctatggcctccctttgggagccttgggctagccctgcttctaggtgcccaggaaacttgaccaaacatacaacaggaggaaaagaagagctgcctgccccctgctgtttggcctgggggataaagcattccaatggtaagtccaaatggaccttctctttgcctcacagctattttgttccctggatggggacattcattggtggctgatagccaggagtaagtgcttgctttggggctgtctctctctttctctctctctcatcagggcatgagaggcctggtgcagaaacagttacattggcattcgattgcaatgccaggacctccttcccaaagtgggcgtcccggctcacactggcagtgaccatgctaatctgtgaatcacagcagccaataccaccttgccaagctgcagatcccctggaaggtcgcctttgtggttccagtgaaagggctgtttgtgctgtgatgccaggccctgggccgtgtggggaacactgggtcccttggagacatccctggggatcagacagggccatgcctttctgtgcacagtcagggagcagaccaaggatgtctcttttagaactgcttcttgggtgggtggaaccccacgcattaggcacctagaaaaggaaacccagggaccctcggaggcaagggtgtcctagcactttggacagaaaacctggggaatgttcagtgggaatatcacatctttatctccaaggactggagagtgtctctaggcctgggcttctcaaactttttttttttttttttttttttgggacagggtctcactctgttgcccaggctggagtacagtggcatgatcactgctcactgcagcttcaacctcccaggctcaagtgatcctcttgcctcagctccccaagtagccaagacttatgggtgtgtgccaccacacctggctaggttttaaattttttacagagatggggtctccctatgttgcccaggcttgtcttgaactcctgggttcaagtgatcttcccatcttggtctcccaaagtgctcccacagtggtgtgagccactgtgcctggcttagtcaaactttaatatgctcaggaatcaccgagagctgttaaaatgcaggctgtgattcagaagatccagtgtgggacctgagattatgctggtctggcgagacacaggctatactgatgctgtgcagaccacactttgagtatcaaggatctggtccatccctcagcctccgtgcagtccatccctgaagacaggcttatttttaaatgtggaaattcccagctcttgaagggggaagggatgagaagcagaaggtttgctctgccagatcgttgggtggagaaaactcctttcagaccagggtagctgtggttcgggctgggctcttatttgcgaaaactgatggtccaggtgcctgctcctaaggaacccatcagcgttgtggatttagggttgggttgtggtggccagagcagtgtttacagggtgtggtctgtgtgttacccaccaatgtgtgggctcttcctcgtgccagttggtcattctgcaaagggtgtgacttcccgaagtccaggagggcaacccagccaaactacctccttgcaaaattaaaggctggtggtgtcaccagggctgcactgcggtgatgccccaggctggctggggaccactccctctggagtgtttgaagtcagtgggcattaagactgccagcctgattttctgtaggggcctgggtgggccttcccaaatggagggttcaacctcaaagaattggctgaagagctgcccgtggagtgactgggggacacgcgtggcaccgtgctgtgtggccctccaatgcacttcttaagaattccagaagatgaaagtgaaagtagctccttttctcaccataccagggtttttcacagctcacactgtcagggactttttccatgagatgtgctttttatgttgtttcatcatcagaggggagcaccatgagtgtctgcagcaggcagaatgaagaaggacctagcatcgtggcggcctgcacacagtaggccctcaaagaagtcttctggttataattattgttgttgtttttgcttttgttgcatattaagtgtatacgatgtgccagaaaccaagctaggtgctgggggaaaaataattaagacccagttctgactccctgcttgttagggcttttattagtacttgacaggctgagcagaggaaaaaacagttatcttctcatggaatatgaacatctgatctctgaattgcctgcaaactccttgagggcaggaactgagtcatgcaaatgtaaacacacgtagatgttggaaggctctttccagtagttagctgggggctgaacgagaatgcattggttgggggtggcaaatatattttcctgcttttttgggtaatttgttagatgctatggagaaactcctggtgaaagagatgggcttggtttgttgacaacatggtgcttgaatcattcgtggattttaattattcatgccacctggtttctcttgatcagtagctaacaaggatttagttcataatgggcagttgtttgtgaggtggatgagtcaggcacgggagggaagggcagtttcaaaagaatggctgctttaagatggaacttgctttgtttttggcattatttggtgattgtcttgggacattgtgtctaattgccaatttggaaatgtaattggcactccaggcccagaatggatatacacttaacgttgtcaagccgagccttggaatcatctccctgtaagatcttgttacctgtatgactaatacttcttcacgtggccaaaatcaaaattatttaacacatctcctttattttctattctttatgctggttcactggcctctctaccagattttcttggggactcagatccagtggcctctaggcatttcaaagcgaattcacaggaaagcctgaattccagccttctccccctcctcctcttgctccatcctttcttttacatccttttttccttagtggctgtcattcctgagggtttctgtggaaagttggtgctgtttaattttggtttctagcacaatagggaggaatacttcaatttggggaagaagtaattaaggtaaacattatgtagatctccccattatcagagttgacttttacttggggaaggggtgtttttttaaaaaggaaaaataggattttagatttttttttttttttgagataccgtcttgctgtgttgcccaggctggcaggctggagtgcagtggcatgatctcggctcactgtaacctctccctccagggttctagtgcctcctgagtacctggcattccaggttctcatgccccatgcctggctaatttttgtatttttaatggagacgggatttcaccatgtcagtcaggctggtcttgaactcctgacctcaaatgatccacccgccttggcctcccaaagtgctgggattacaggcatgagccaccgcgcccggcgagattttaggtttttgacttgaagtgaagttaatttccatctgttaactgctgaagtctgggaccatgatgtcttttgcaaaagagtttttaaggcaagactgtcagtaatattctttccagggtcacttctaactgtacgaaactattcagccacgatgggtctgcatctttgcatatcattgtaaaccaaattatctacaggctgttgggctgcctgtatgtgcatttcaagttgggagtataagatgagtatttattttattttctggttccatgtcttgttcttgctccttcttcccttttagagactggacagtcctctctgtcttcatctttgggagtgaactggggctggggggtgggatcgagagtggcctctgctggctgggggcttcaggtttgtagattagtagacaacaaatagcgacctgatttaacaagtgcagaagcgcatggaactataaattcacagtggtggaaggaagctttggggcctcaggccctgtgcgattcctccccagtgctggaagcccaccctaccagtgtgtttatgatctcctgaggccactattccactggggacaaacccaccttacgatgaacttggaaagatctttctgtttgcactagtccttgtttgcttctagtctgtgtctgggacatgcagaacaagccttggtggatggtagatttcaaattctaaatccagttcaggaagggacagagctgggtggtgtttccatgtccgcagtgttgagacgtagaatgaccttaaccttaacttgtgtttcctccatgaaggccactttatttttctccctgatggcttccctgggttcttcgtcctcctgagacagtgtggtttccctttgcccctttgcccagagttcagaaaacgacccattctggttgtttcttgaagtttgccttctgaggtctcttcggtcttgtcagcagctgtgactggaggcttttgactgttgctgggccataaattcacctccttatcaatgtcacgtgccttgtatctccaaggtttagcccccttctcagtttcacgtgggggttgtaatttgggggccctgccaagaatttggatgtagggtacagagcctttgttaggaaactcgagttggattccattttctaggtgttgactctttttcacctagggagacagacagtgctcttgaacctctttttgcatcacttgaatacagccgcttcttagaataggaggctgtttctttcccacctgctcattgggtctcctttcctctggggctcctgtatgcctctgctgtcatctcccctattttgctgaacagaaagaaaccagaaaagaaaagagagcaaaacacacaaaggaagaaggtgagggagggcaggaggtagagggagaggttgacaccaaggaaaaaagaatttctcctctgagagttagaggttggataaatagctaattggatggattttggttttagttacctcacctttgtcttaatgaataaatcatgtcaaatgacttcacctccaaggagtaaagcattctaccagtgggtagaatgagttcacgtttggaaaattttagctcttcaaacgagacattctgtggaatgaactgatagcacgcggcctgtgtggctcagaggtgaagcgttggaagggtttgtgggagatgttctttgtgtgcttgttaaccaagagcagaattctgctcctctttgggagaagttgccacattgacgttgttttctctttatgtggttttggaaagtggaccctttgtggctctggaaggggaaaaatgggcctccagttattcaaatggagaactcagagataagtgttctaaggcttggaggaaagatttggaagatgaaaggccttacccaagtgctagggatttttatgaccaacattagctggcaacagcttaatatacattgttgttctccttcctgcatctgggaacactttcctcccagagcttagaggaattatttcagctgcccatgaattatggccgtttctcctgtggcttgtggcagccacagccgatcaggtggtagattcttgaagagtataggaatgatgtctctagctgagcccacaagagggctcaacagtttgcctcagtctaaaaaaaaaaaacccaatcatttcttaagttctttcacaaccctgttttctccataggatttactttttaacttcagtattttatattttgtccttaatcccaaatatactacatgttcattgtagaaaacgtaggccgtgcaggggcattaaacaaaaaggacacagtcacatctgttaggatggctactgtaaaaaaaaaaaaatagaaaatcaccagtgttggtgaggatgtggagaaattggaacccttgtgcagtgtttgtgggaatgcaaagtggtacagatgcggtggaaagcagtatggcagtttctcaaaacaaattaatcattcaattatcatataatccagcaattccacttctggttagatatccaaaaaacttaaaagcagggtcttaaggagatatttgtacacccatgttcacagcagcattatttacaatggccaaaggtggaagcaattcaagggttcattcacagatgaatagattagcgaattgtggtaggtacatacaacagagtattattcaactttaaaaaggaaggcaagtctgacacgtgctaccacatagatgaacatcgaggacatcagccaaatgaaataagccagtcacaaaaggataacttccacttacatgaggtacatagagttgccaaactcatagaaacagaaagtagaagggtagtttccagggccagagggagggaagtgtttaatgggtatagggtttcagttttgtaagatgaaaaagttctggagatgggatgcacaacaatgtgaaacatgcacatttttaagtgtgaagtactacacacttaaaaatggttgagatggtacttttttttttggcagagtctcgctctgtcgcccaggctggagtgcagtggcatgatctcggctcactgcaagctccgcctcccaggttcaagccattctcctgcctcagcctccggagtagctgggactacaggcgcccaccaccacgcccagctaactttttgtatttttagtagagacggggtttcaccatggtctggatctcctgatctcgtgatccgcccgcctcagcctcccaaagtgctgggattacaggcgtgagccactgtgcccagcctaagatggtacatttttgtcttctgtgtatttcaccacaattataaataaacatttgagaaaagggaaaaacattcctccaaattccccctccaggagatgaccagcattatctttgggcacatttccttccctgacatgttctttacggtggcgttcttgttttctcggtgggcagctgatattcttcctctaaagattgcagcccctctagaagcacccaggctgactttgatgtaggccctgcccacattgagagcagacaaatgaagagaacaaccctctttctgcctgtggggtctggtttaatggtgtctactcttagagtgaagttaagggagcgccggatttttgattttgacatatgacaagtgactagctacagtgtcttagacaagtcataggctccaggccttagttttctcatgcatataacaaattctctgatttcatgatttcaatataaagccatttcttaagtcagattttaaaactatcatttttacctgataaagaaccaaagattaagttattgagggcagtgaatccagggagaagttcttgttctactataaaacacaagagtgaaatttgattgacttgtccccagaacttcaatattgactttgatgacatatttaagaattacaatctagggacacaggccccattggaaataccatcaaacctgtcatttaaaaaaaaagtctcagaaataggtttttgtgactctactattacttctaatgatatagccacaccactattgaggttttaattttaatttttggtgtgggggaatggttcagaacatcttagattatagactataaatagtgtgctatgataggctggctttgttgaggttgaacataaaaagaaacatctgattaaagagaaggtcatgcaaatcaacttactttgatccttttccttaacttgccccaaaacgcagccttggagatagaacgttcatctcagccctgttccacggagcattccagctgccgaaagcagggataagataactgcagcttctgtggcaaaagagcaagtgtctgaagggatgattcctaaatactcagtaacctccgaaaaaaactccccctgaaccgtaagcagccagcacatcagaacttactggaatagttctcttaggttacataacatcgattcgattatgctaccggagccatgcattaaattttaacttgtcacagatacattacattaacacttcacaaatccacagagtaccaggtagctttggggtgttggtaattgtgtaggacttgctgcaatccaggcaaaaatacttacttgtacattttgtttcttctgtactatagtttaactcttttcaggggtgcaaacatcctgcaaatattctttctttctttttttttttttgagacggagtcttggtctgtcgtccaggctagggtgcagtgtcacgatctcggctcacctcaacctttgtctcctgggttcaagcaattctcctgcctcagcctcccacgtaactgggattacagacatgcaccatcatgaacagctaattttttttttttgtatttttagtagagatggggttttaccgtgttggccaggctggtcttgaactcctgatctcaagtactccacctgcctcggcctcccagagtgctgggattacaggtgtgagccactgcacccagctgttccaagtacttcttacaaaataaactaaaaatttagacaatagtgattgccaccgtagtactgaatacttgatttatgaccatggactagatatggcagaggtttttaaaactctgtgaaccttttcattttcccgtgacaggcaatgcaagtgctgtatttttaattggtccctttttaaagtcaggagatgaaatgttatcatgcaaatctctcctaagttgcatggaaactaataaaatcacgaaggtttctatttgtactctacgaacacagactgtaatgaaactaaaacagctatctccagggatgatgctatttaaattctaggcagggctttaaaatgattttcatggtgaaaacagaaactagcaactgagatgttcctgttctttcttcctcatctcaccagtgcctgttcacccatgttcctttttacttcctgacctcagaaaatgaatgtaaagcaagaacctccggtctctaagatagcctgtctatcactggttttagaaaacagcaatgattcctcctcaggtcttgcatttattttcagacttattggtacttttgttttgggaagtctttctgtgggaattggagttactattttcttaggggaaaaaaaatcagaacaaacttgtttgagtggcttctatgcattaagcattgttttaagctccttatgtttattctgttatttaatcctcaaaacaatcctgtgatgtagtccccttttaaattcccattttacaggttagaaaatggatgcatagagaatgagaatgtttttctttttttggataacaaactttgagtgattactgtgtgtctggttgtttttaaactatatgtattatataatcctcacaacaacccagtgaattcggtggtattattatcctcacttatggattagaaaactgaggcacagagaggttgagtaactgctcagggtcacacacaggtgaggagcagagccagtttaaatccaggcaggtgggctgtggatcccatgcacctaatcccacactgtacacctcatttatacctccttagctcttcctggccacagtgtgagggaaactctgatgacatagacaggactgaaaagaggagtggtgtgttgttcctggagagatgtgaggtcccttgacaagttcagagagttttgtactactgaattctcaggtatgtcaattcccaggatgagaaggaaccttaaatgttgtctagttctattacattccctgagtcttagtttttcttgctggaaaatgggataatcaccttttctctacctgacaggcagtgggctatatacagtcatgcaggttactcaatgtacaactccaggactgctatgagattcacatcagatgacatataaatgtattttatgaaccacagcacatgtgccacatctctgtgctggggggtatgtggaggcacagaatcaatattgggtcatttttctgagtgtcaacagtcttccatgaagttttggagaaaaacactatttttctctaaaacctccacctcctgggctcaagcaatctcccacctcagcctcctgagtagctgggacttgcaggcatgtgactacaggcatgcaccatcatgcctggctaattttttgtatttttggtggagatggagtttcgccatgttgcccaggctggtctctaactcttgagctcaagtggtccacctgcctcggcccccaaagtgctggaattacaggcgtgagccactgtgcccagcagaaaaacactatttttggtattaacacttacactgtacacagagtatattggaggtaggatgcagaatttaagtaggtttttaaaaacttgagagaggggtgtgtgtgtgtgtgtgtgtgtgtacatgtacgtatgtgtgagatgcacacagattcaagagagcatgggggaccagcaaagtttgcacccaccagcgaagtctcatcattaaaccatgggcctgtgcaacctggtgtggaatgatgccttattatcccacatgagatatgctcatatctcaaactctgaaactgtgttagtaaaagaatgggaattctgtgaaagagaaataaatatatccaaattccaggtctgttaaaatttagcgcacttggatgttggtgcgacagagaatttaatctgcacactcagaagaaggtagtggttaactcattcagtggttatgaatcttccttgccttagaaagatcaattccttgtgcctctccacctccgtggcctggaaatacattattatatttcaatatggctctctttctaggccattgcgcattgtggccgtgtgcctgccaaaccccgtgcatggaatatttggaagcaggagacaaattggttagttagcaaatctttattagcatggctggccttttcccggggatatggggtcatgtaagacatcatttcctctctggcaataccggtaaccacattgcatgattccagggcgccactcacatcctggtcatgaatgaagccctctggagttgtgcagtgcacagcctgcatgcccatatacattgtcttttctaggcatctagctgtgtttgtgtaaaacccttacacaacaaattaaaaacacagtgcaaagcccataattcttaatggcaatgtgaataacagaaacatcaagaatttgggtttccaaaaatggggagaaaacagaactggccgtagagggagtggccagagagaacccactggggatgtggggttatgacggcagccccagcatatcctccaaatccagcctctgcaacaggcgctctccctaacttctgatcactgtgcagctcctgacatgatacaagaggcctcccaggcctctgtgcctgttctaagcatgagccttggagaagagagaatgctcagtgccagctcatgtgtatcccatggacaaggactaataggaccctgaggacttagaaaagccttctctgttgccaactgtgctatttttacctccctcccacagctcctgctttccccaggtatttgtcagcagagcgtcttgcacctgcatggaaagtggcagttggggcccaggatggccttgtgctgtgcaggccacagcagtctccttaccaggcctggcggccaggcccggcggccaggcccagcctctgaggctggcaggctgtggtgaggatggttgcataactggcctttctgccgctggttctgggtgaggtcgagccagagaaaacagttctgcagtcgacagcccctcctgggcactggtgcaacagacaggcttgtgggcctggtgctgacccctcacggtcaggagccacccttgctcttgagctgctgatcatcactgcagagtgcccaggtctgatcaacatccctgctgggaaaagcggagatgacctggcgtggtccatagtgatccaaatgtgatagaaggctgggggtggccccagtgatggcctactccttcccttccaaccctccacctcctccatcctccaagtcttagctcatcttgctgggaatgccgccttcctgggaagccttctctacctaccctagtcagctttctctgcctctcccttccctgatgcgtcctctctgtttgtccttccatcctgggtggggagcagccgtctgatgctgcagccctattttctatacaggcatcctgtctcctctgcagacagctccttgtggacagggctggtcctggtttctttctggatctgtgcctggcaggtggtcctagagggcagtgaccaggggtcgctcaatgtggtggctggtcatcaaagcaggccctcagtgaaccacgactcctcacgttcatcctcttgggttgtaccctttggggcagagctagcccctgtaatccatgggttgcttgtaacccatggattgtggtggaaatgatgctatgtgacttctgaggctatgttggaagaaccctggcagttcatttgttatctgggaatgctacttcttagggaagttggccactacagggggaagagcgagagtgagaggaagcatgtgcgtgggcatacgagagagagagagagagagagagagagagagacagacagacagagagacactactggggcaccacgcatatgtgtgaagatgccatcatggaagtggatcctccaaccccagttgacatagattggagatgaacccaccagctgatccctctatgaattccttacttaaaagtcataaacaaaatgaaatgattgttttaagccactacattttggggtaatttgttacatagccatggatgactggaacaaataattactatttagtgaagtcctttcacaaggtccagctcctgccctctttctaggttcctcttaacatcttcccaagctctccacacccagccacttaggacttccttcatttcgttaaaccttttgatttttacctctgggccttcacacatgctgttcacactgccggacttctcttttcttgtcctccttctccccttccacttagctgactcctgtttatccagggatgtgctggtaagtgattaacaacgggatttctagagaagaaagtccctatgtacggtgttcgtcaattcctatggtataaatattcctgccctggctggtttgaagataccagtgtgatgtcacagaacatagggtattgttatccatgattggcagttgtggaaactgaagcccagagcagttcagtcacttttctgggtagatcccaggcagatatggcctctgatatgcttggcctttgagaccatgctctttcctgttctcctgaagaaccagtagctatgagcacaggtaatattgctgctgggccatcctgtttcttctagacgagtagtcttccctctgcatttcttgagttgctgcaggctttaccttatgcttaccatacctggccagttgccagttaccacaccacgctgctggtttctctcctggaccatatttatggtatctagactctggtgtgtgcagtggcgatggaatcattgaggcaacagggacctgtgagtccatcttgaggtttgataaactgtgtattagtcagctaggccacctctgtaacaagaggtcaacatgtcaatgacttaatacagcagaagtttacgtattgctcatacaaagtaccattgatggtgtgtgtggagggtgcagtgaagacacacttcagacagtcattaaagaccccggctcctttcacttgtggacctgaaatcttctaggggcccctgaaggtctctgctggaccctctgcatctgtccggatgataggggatgagaagtaaggatcatgaggggtagttttgtaggggtagttatggaagtcattcacatcacgtctacccacacagttcattggccagaacttgatcacatggtattttaactgcaagggatcctgggaaatgtagcactgcacccaggagattgaaatagatttggagaacacctggactgctgaaggggctcccgagtcccacactgagggcttctgctgtccatagctggctctgccagaaccattatcatgacccaatgagaaaactgaatgtttactgggtatttgctaggtgtcagacatggtgtcaagcactttatatgcattatctcaatcctctaaatcagcctatgatgtagatactatctgtatttttcccattttacagatgtacaaaaactggggcttgcaatggctatgtgatgtcacttgcccaagaggcatccttaataagtggcagtaccagcattagaacccagggttttctgtcttcagattgttaactcttaccctcttcctatgctgctctggagtgccttcagctctgcctcttcttatccctgtctgcagcttgaaagctactcagcttcttaaacaccttcaggataaagggactaaggggcataactgcctccctgcttcatgtttcaaagagattgtcactggtttacgttggccctaattcaggggtggtgaattgacagtagttacctgagcctgccctcatgatttgaatgcatcatctcccagtctgccctctcccactttgaatcttacctggcgtggctctttgcctggagcattgagagtggaaggctcatggatgacagaggctgcttcccgggtttcttgtctcactcctgtggtgatgtgcttcaccttggaaatgcacttcactgtagccccttctacccatgtccaattttatgtctcagcaaagtaagttcaacagttcactgctgagaaaacagggtctcaaacgtgagtagtaacataagtaatacggttgcctttctaaaatccaatggaccagaattgtaatgtctcaatgagcaacgtctctcattctagatagttcagtgtggtcatcagggacatgccctctggagccagcctactcaggcttaaatcatagttgtgttgcttgctgacctttggatcttgggcaagccacttcacctctgcatgcctcagttcactcacttggaaagtgggaataaaataatactgaaaacgccctcaaacagttcctagtatcaaattggcttttttttttttttgagatggagcttcactctcgtgcccagactggagtgcagtggtgcagtctcggctcactgcaacctccacctatcaggttcaagtgattctcttgcctcagcctcccgagtagctgggattacaggtgcgcaccaccatgtccggctaatttctgtatttttagtagagacggggtttcaccatgttggccaggctggtctcgaactcctgatctcaagtgatccacccgcctcagcctcccaaagtgctgggattacaggcatgtgccactgcacccggtcttcaaattgactttcaaatgctgggagatgtcaccccacattatcctcctgctgcctggggttgttgggaggatcatgtgttaaatgctgagggtagcacttgctacaaaccaagggctaggaaagtgttagttattactgttactttcatttggtcatctttgggagactgtgacattttcccctaatgtgggcattgacaataacctcctaggtcattggtcactctgtttctggtaagtctccactctagtccatccaggttggattgcacgtctgtggaatgtccaccccctgctggaatgtagcatctctgaagcctaggactctgtgccttccatctttgcatccacagtgcaacattttgaatgttcattttggtctcttaaattcagtcttgtgaggctcttagcctagtttggaattggtcaaaggcgggtttgagtcctggctctaccttgcattagcttggtggttgtggccaatttacttaaccttgcaaagctcactttcttcattggtaaactgtgaatactaaaaataccagccacgtaaaggttttgtgagtataatagcatttagcatcttgtaagtcctcaataaatggccctgttatgatgaagttggcctttattttagatccctctcctttgtcaatataaccaggattgtgctgaactgagggacaggagaccactggaaggggcagggtagccaggggccaacagtgagcaccaagacggacagtgaggtagtgctaaagatggaggcagaaagtagggttggaggaaaatggggtgagaaatgctcccttccctctgcctctcatcacccacggcacacccctataccactataggaaggacgagggagaggggaatggagagagaggaaaggaagaattttgcagtacgagatgtcaggcattgaaagggttaactcaggggcgaggcctcagtttgccacctgtaaaacggaggattggatgaggccattctgagggtccctggtggctccagcagtcccttgcatttttataagaattgtgattgtgctcctgcctgttctgcccctacaccacccaccttctgcagcctcaggcagttggagatgatgtcaaaaggaacagaaggggtggaaagtgctggagggcatggaatggtttctcccagaaggctgagggtctgaaaagaggcttagaagcctggtagccagagcaggacggacctggtggacccatctggtgatcctggggctgctctggggcctggtgaatggtgaatggaccagaggcaccttttgggctctgaacaaagaagaaaggccaggctccagacccagccctcctgcctggtgggctttttagttggcactttcccctatttaggaacctgtgctactctgataggctgaggcagcccaggcgcctgtgttaaggttgcttaacatctggtatttgtctccagactcttttctctatcagggattatgtgttctgaggcacccaaaacatctttctgtacaccaagttccttcatgaagacttccgggtcttctttccacttcacactcccttttatctcaagcttattctgccacaggcatttggttaagcaaatatgttgctcattggcaacttgtcccatacctgggccaggttatgaagaggattccaagagtgtcagtcatgtggtgcttgcttgggggagcccaagctgagctggggctgggtgagggatggacaagggggctccttcctctgctcatgcagtgaggtggaaagggcatggggttggggtgcaaggacctgggttcctctcttgcctcccctgtgtggtcttgggcaagttgtctaccctcctcatgcctcagtttccattacatgtagggtgaagaccacagagaaagttccacctagcacatgaaaaatactcagtaggtaatggctcccatttttgtgatgtatccaggtagaataatggcatttagcagaagtcagtttattcaagctcacctttgagtctatcttacacaaagcactggttaggtgagggatggcgatgagccccggagaattccgcatgcttcccttctttagctttccagctagattgtaagctcctaactggatccttcaggatttggcacactctggtctgtgggccactgagacaggacatacatcttcttcatttctttctgtattcccagcaccaaacacgtggcatgtctctggtgggcatttggtagatggtgggcgaatgaatgaacaaacgagcattcagtaacctcttgctgatgaattgactaatactccacactggttacatttatattttgggcactgaatctctttgttttctggctctctcagggtatttaattttttctggaagctgaggttgagcctttcaggccacctttaccaggtcccaggctccaagtagactagacacccacccaggcctgggcagtggtagggagggtgtgacccaggcattggcctgcaaatttgccccagctccttcttgccaatgacttgtcacagggctcctgaagcctctcatgcctgactgcctcagaagaaagggtattttgtgagctctgtgggtgttaagtgttgaggagcagttcccaccagcagacagccttcacctgtgtttgataaaatgacaaattcatttttttcttctctaccccatccatctcctctttccttccctgtctgaaggggcctctgtcaggccagccaccagctatcgtgagaggagccaagttcctcattgccctgtgctgaaccgaactgcagcaagttggatagaggaggcagttttggcttgaacgcaaacatcctgtcggagaacagagtgattatagttttagctgcacacggggaaataacagcacagaggtgaatcatggcatctgtttactgctaattaacccctccgtgtacaccagtgttgtatgtgagccggcctgcggtctgaaccgcctcctataaggagggctcccttggcagccaaaaccagttggcccaaatgccttgataggcttcctgcttcacttgttgcccatgtggtctgattttagataaaagcattgcttttgggccagataagctttgagttctttaatgaagcactgtgtgtattggagagaggcacagagcacccagagctgaagctggtcagtcctggtcggccacagtttatggggctcctgggaggttttaaactctgtgctgcaactggggaaggttgtgggggaaggttgggtccagggagctactatttattgagggcttacaatatatcacattctgagctggccactttacatcttagctggtaaaattctcacagtgatcctgaaggacaagtgtggttcaggagctgagactcatagaggttaagaaatcacctggtggtggggttttggggagggccacacaggcatcccaagaggtagaagacaagctcagacatccaggaacttacagacttattgtgtgtgagatagttccataccatttgtaatttattcccaaaataaacagttattgagcatctattgcatgcctgtgctcagtgggggtggggggagtagggagagagaatccagaaaggagtcagctccagctttgtcttccataagcaaatggcttagaggggattgttcattttcactgttttgttttggggcaaggaggtgtgtcagggaggtgaggaggtagagtagagaatcatcctccaccgtgaagtgaagagaggaaggtacccccacattggaaatatgccttgaggaccagaaggaattgaccagtcttttgactttcattttttaaaattgaagtctaacatacatgtagggcatgcacagacataaggtgtacaggttggtacaatgtatgcgcctgtgcagccgcctgttcttggaggcaagagccctatgagttgcatgtggtcttcaggcagaatgaggagatgccgaccacaagcgctcctaggaattcagaggaaatggagcgcaatgaacccctccaaatctagtttccaccagaagggagaggaagatgaatattcatggatcttgatctctttttgcatcatttacattttgctttctccagatttgaggctccccacctgcccctgagttctgaagaataattgtttcatgcatcacatttttactgcattgggagaaaaagagggaaaaagaaaataaattgggagaagaaaagatgataggacttcttgactagttcagccagtttcgtgaccatgacctagaatgtgcctgggtctttggccatgtccgtgaaatgtgcacattatctttgggatttgcaggagcaaggtctggtgctgggctctgatgtcctgtggcctccatatgttcttgggaggatgtttttggatctggttaggtccatgtgttgggagcattgggagccaggagaaaccagaatgccaccaggattcccatctctttcttctctggactcctttagcttgcactgttgcatttcttaaatcatgtcactagtcaaatatatactttactgttttgtggaccttgatcttgccttgctgattagattatgaactcctctttggacttatgatcagagtgccttgtccttccctgatgtgctgtcccctgcgtacctagtcttgtctgagcacacagtacctcgccccatgaatgcttgctgtgtgcactgattttgcacacagcaagggtttttggtaaagttgtctgtggcttgccattacagggacataggattggatctagataaaccagtagaacagtttctgtatctagacatctgggtgaacactggccttggggaacagcagagaagcttggaaaaaaaaatgataataagtcacacttaatggagaactcgctatgtgccgggctgggtatgagggactttacgtagctgaatcagtgataagcttttgattgcatgtagcagaaatgctcacttcaatgggcttaacattaaagggactccattgactcatatagttggaaaggtggatgacttcagatgagccttgatccggtggctcaacgatgtctccatggacccagtttctttctgtcactctaatctgctctccttacagttggccttgtcctgaggctggtttgcctctgggttcacacatggctgctgcagctctggagggcacatgctgatctgctcaaccttgtcaggaaataaatcacctttgcaccagcattcctagcacaggttctgagagttgctgtaactgaactggctgaagccagggattattgtcagtatcctcagaaccttatggatctcaaatggaaaacaaggtctgcaaggaatggggaaggtggaagtttggaaaggagttagccaaagtcccctacacatgggtggttgcatttaatcctcatagcatccctgtgaaattggcatgattatcacccccatttacagacaaggaagcagaggcacagagaggccaagtaatttggctcagttcacatagctcatggcttaagccaggaattgagcctggacagttggactccagagctttgctctgctaaccactccatggcatttttcaataagtgcttttttgtttttttaattgagataaaattccttcttttaaagtgtacatacagttcggtagttttttagcttattcgcaaagttgtgtaaccatcattattatctacattttcatcactccaaaaggaagtcctgtaccattaagcagtcactccctattccctctgctcccagtccctggctggtctactctgtgtgggctctctggatgtgcctgatctggacacttcatataagtggaatcacacaatatgtggccttttgtgtctggcttctctcacttagccaatgggagtttctgactaggatctactgtgtctgacctcaaggaatctccattcctatctttcccagcagaaaagagacagcaccgctggccgactctggaagaaagagattctgtgctagagagagagagagcctccacccttgtactccgcttaccttttggggcagcccgaggctgcggctcagtgagggcagctatggatatgcacagtgagggtcattctggattctccggcaccctctatgtgccaaggactgtctgaagccctgggaaactgcaacagaaagggctgggttgggtttcagtgtgtgtggtggggggtgcagataatcaacacttcagtaaatcaatgaatgagataatttacagtggcaccatgagaccactgaacaggggatgggattgtgtgtgttagaggggctgctttggtgggtagccagagaagcctcttttgaggaggagatggtcatatggcagaggcaggactgaggagaaagtgagggccacacaggatttgggccagaaagccgcaggcagaggagcagctggtgcagggtgggaacagggtgacctggcctttgggcgaattggggatggtgggtgactggccgccttgtttctgttttcatcgccttgttactgctttttctaaatggttcctcccacacagacatcttttacttgcagcttctgctatggaaggttttgtccactgctgacaggctgtggggagttccatccttgagtatgtttggggctttattttcagtctgtgtttttgaaacttgagccctgacttcctcttgttcctgacgcaggcctgagagtgccaattggctgtatttttttttttaaaatgaacacttattattaaaattttctctggataaataaaaattgtacttgtttattgtatacaacatgttgttttgaaatatgtatacattgtggaatggctgaattgagctaattatcgtatgcattatctcatatacctattttttgtggtgagaacactgaaaatctcttttcttagcagttttcaagaatacaatacattgttattaattgttatcaccatgatgtacagtaatagatgtcttgaatttattcctcctgtttaactgaaagtttgtactctttgaccagcattcctctcccatcccagcccctggtaaccactgttctgctttctgctcctatgagctcaactttttaagagtccacatataaattagatcacgtagtatttgtcttcctatccctggcttatttcacttaacatactgtcctctaggttcatccatgttgttggaaatggcaggatatccttcttttttaaaggctgaatagtgttccactgtgtacatgtaccacaatttctttatccatcatccgttggtgggcacttagataggttcgatttcttggctattgtgaataatgctgctgtgaacattggaatgcagacatctctttgacgtactgatttcatttcctttggatatataaccagtagtgagattgctggatcatatggtagttctatttttgatttttctgaggaacctccatactgttttccataatgactttatcaatttacagtcccaccaacagtgtaacagggttctcttttctttatacccacaccagcacttgctctctctctctctctttttttgcttatagccattttaacaggtgtgaggttataactcatcgtggctttgattgtgtagccctgatgattagtgatgttgagcacctttttatatacctgtgggccatttgtatgccttccttggaaaaatgtctatgcaacggttctttttgatagagatgttaaataaagcagttctgggcagagggagatcaatgcaagtgtctataacaggctgagagttgattcactggtgaacaggacaaccaaggtccctgccctcagaggtctgagcaattccatcatcagtgactagattgaacagataatcccctcttacacacgtatatgcacacttcagcctggagtgtgatgagagactatggactataatgcgtgtgtgtgtgggggtgcatcctctccttggccggggctcagggaaggcttccctgcagaaatgagacctacaggcccggcatggtgactcatgactgtaaccccagcactttcagaggtcaaggcgggtggatcgcttgagcccaggagtttgagaccagcctgggcaacatggcaaaactccatctctacgaaaaatacaaaaaattagccaggcgtggtggcacatccccgtagtcccagctactcttgaggctgagatgggatgattgcttgagcctgggaggtggaggttgcagtgaaccaagattgtatcattgcactcctacctgggcaacagagtgagaccctgtctccaaaaaaaagaaatgagatctacaggatgaagaggcattagccaggggtgggtgcagggggacgtgcagaggaatggtgtctttgaagactctgaggctggaacaaagcttcatggaaggaatgagagctggaaggacggggaggacttaggcagaaagcagcatagtccaggccacagggaccctaggaaagaggatggaggaaagaggatgacaatatgttacgggaaggcagggatgggtctcttttgtgaattacttaacccctaatggctagcagtgttgagcaggagaagggacctctcgagtggctgagtgtgggtgtcagttttcccttgctgctgtaacgaccacaaacatagtgccttaagataacacaaatatactcctacagttctgaaggcgagaagtcggaaatcagtttccctgggcttttaaagtcaaagcgtctgcagggctggttccttctggaggctctgaggggcaagtcgtttttcttgccttttgcagcttccagtagccacctgcatccccagtcttgtggctttctgctccgtatccaaagcacattgctccatctcagtttccatcatcacatctcttactttctcttctgtgtcaaatctccctctacctccctctttgaaggacctttgtgattgcatttagggcccacctggatgatccaggctaatctcttcatctcaaggtccttaattaaattatgtctgtagagtcccttgtgccagttaaggtcgcagtcacagattccagggatgaggacgtggacatcttctagggccatgattcagcccacctcagcatatagatgaatgccatttttatgggaatcagtgaggcatgctaagcaggaagcaatgccttttgcaagcagaggtaggaagatcggtctagtccgtcagctggcactggccaggctccactgtccattatcctcctcacctgccctaatctttcctttattgctcctaagtgataccacgtagcttcttcagtctcaaatcatcctactcagacccttttctgacattcagagccttccttatcccacagttctttctgtccttttcccttcctatctgataaatccttgtgagtagttgacaaaagagtgcctgaagatgtcagggcagaggctcacttctggtctgtctagttgggtgagtctgaacttgaggccccagggcttattggaggcaaactgagtcatggagagggagagtacagtaaggccactaccaagggctggctgcagagggtgcaagggttgcacgggttttggggttgttggcttccccagaggggttctttgtatggtgtcaaggtgcctgtgggcattaggtgactaaaaggactgaacacgataaactcttggtggctcttcctgctgcaggaagggaatactccaagttcccagaggagaccacccagtgatggagtgaagctgcatccttggctcccctcagctcaggaccctcagaaaggacttaggaagacgggcactgccagatacagacgtctttctggactctaggaaggggtgccttttttcttttctttaagagatagtctcactctgttgcccaggctagagtgcagtggcatggtcataacttactgcagccttgaactcctgagctcaagtgatcctcccacatcagcctcccaagtagctaggactacaggtgcgcactactgtgcccagctaattttttaattattttgtagagatggggtcttgaactcccagcctcaagcgatcgtcccctcttggcctcccaaagcactgggattacaggtgtgagccactgtgcctggccaaagatgcctttttgagggccatgaggggttgctgctctgggtctgggcatttctctggaggagctgcttgtacagcaatgattgtcccatccctccttttagtcccacaggtcagagtgggacttaggacagtgggacagtgggacccaaaacttaaagccagcctggtatttcagcagtattatctgttacctagagagaggctgatgcaggggtgtctgggaggctggagggctgcaccaagggtggatggcagagcctgagccatgggtctaggccgcagcactgccatgcggctgggaagatggtagtgtgtgggtatagtcatgggtgttgcggcttatctgcacctgcttgcgttcaggcagaagcagggtagcgtggcatggtgaggaccatggattcagttccagctcggctgctgatagctgcatgaccttggggaagttgcacatcctccataagtcctagttttctataacatgggcatccctgatgtagagcatttgtgcagttgtgtgtaaaggatgtggcagttaggaagcacctaccaagtgtgagccatttctgttgtcattgccatgtatcagccagcctgagggcctgcagggcctggcctgggatgtgggaaagctttccagaaagggagcaggagatggcgccctgtcacctccctcaactgggccagagtgtggggaggctgctcggggcttgctccttctgaaacacccctgacgactgtcccagcagaggagggaggctgccttggaagcctggctgcactgtgtagggagggtacccagcagagggctgggaggtctccaggcccctttgagcactgacagcccatcatctgacctctccaggaacccacgagaaagcatgagatgaacagacagacttggcttgaagctcacttcctagttgtgttactcctcagggcctcagttttgccgcctaaaagatgggaatcacgtcccacttgccgggtgctttgaagctcaggaaagatgaagcatctcttttagaggccctcagggctgcaggcaccatgccagctctttcctgtgttacctccttaaccctcttcaaggagggcatccgggacagtccctggcaactagcaagcacccaacacagggcccttcttaccaggtggcctctgaggacctttcagccatgtgcccctgggctgcggctgggcgcggtccttgggagggatgtccctctgtggttcctggaaagcccggcagctggctgctttgttctggccactgggtgtctgctgttaggactgcgggttttatggctgtttccttgtgctcaaccttttataggtgaccctgtgttttttggagccacacctgatgggggccaaggcctttgaaatgttccagagtctttatgggctgcagcggcatatggtgggtggcccaagctgcctgacaaggaaggggtgggggagggtggaggcagggaggccaggacctgcatttccaggtgagcctgagacctcagacggatgtgttgtttttctagttgcctacttaggtctactaatctttaggaaggaatgatagcctggtttatgggatatgacataagtttttctaaaagggacctgagatgaagaattaggcaactcttttttttggggggcgggggatggggttttgctctgttgtgcaggctggagtgcagtggtgcaatcatagctcactgtagcctccacctcctgagttcaagcgacataggtgcacaccaccatgcccagctaattttttttaattaagtaaattttttgggggtagaaatgaggtctcattctgttgcccaggctggtcttgaactgctggcctcaagtgatcctcctgcctcagcctcccaaagtactgggattatagaagtgagccactgtgcctggccaacaacttttaaaaactaaaataaatatcatgcctgctgattgttttttcttgagacttctttttttcttctctttcagtttctgttactatgtccctcactgtccttgacaaaagaggctttttatgcccactgtgggttttgcaggtgatagtttagtgtagaatggtagtgaaagccatgggcttagggtcagacaaagcttggtttgaatcctgtccctaccactgaactgacttgattgtcacctagactagaggagcaactcctagcattcacttcctcggggccaggacaagttggcatcctgctgcacacagggcaacctggagaatcaagagaaggctgccagcctcagatgccagtggctccctaggaaagatagtgttagttggtccccagtaatatctggcctttatcacacacctttatgtgtcaggcaccgttgtgagcaattcacattagtcctggaggcaggaaatgtcattaacctcatgttgcaggtaggggaactgaggttaagtaacttgtctaaggccacacatgtagcaagtggcagaggcaggatttgaatcaggcagcccaatgccagtgtctgcacttagaatcactgagagccatattgcctttctgagggctgttcttgatctgagagactagagtcctctgtcaagagctagtactgggcagccctgggggctgggttgtggggtgtgggctgtggaaggagtaagggaggtgctttctgctgtgtaatggggcaggtggttgggtgtgaactcgcctgacttacggccccagctgtttcctcttctaactcctcctcccagatgcctgccaggatgccagaggttagagggaggtgtgtccaatcatggactggatctgaggtccctctccttccctgcttatgacacaaatgctcagaccctgttctcctgaagggacacagaacctgtctccctgtttggattgcaagctccagactgcatccttgaagtgggacaacagagggaaatctatctcagcctcatgatccatggacgcatctcattcagtcctgggctccttgctggcccctggtgctgcagaaatccatggctgagggggtggagatgggtgggggggaccgaaggaagctgtgcaagcctgactctgcaggaagtcctgcgaacgctggcattaaaaacaccattgcctgttgctttatttttagtggtacaaggagccctgagggcaccaggggggatgtgggaatcctattttttgctctgtcttgctaatggaacctctagcagtttttatgcctgatttgtttccctctgaagtctgtcatgcctgcagccccagactgtactcttccttgcacacagctcagaggaacatagacgatggtgtcagctgttggacttgcagccccacttcctgccagccccggcttccctgagaaggaagagggccgcctctcttgtttcatacccttccccattcttggcttggttacattgtgcttgtcaaataagcactcagctcccctctgagatgaatgcatattcccggaggtgtcccctggacatgctctgagaatgttcccatgcttgctttggttactcagaaccccgaaatccacgggagggatgagggtggttggctggcaggaggggctgctggagggctgaacaaatgcccgtgtggggtgctggtctcctatggtaggattgcaagggctgctaggtaggactgatatgtgcccagtgcccaggtgacaaatgacagacagcttgtggggcagggaagcacctcctagtgtgctacctccatattcttctacaccatcaaattttaaaaaccgagctttattgaggtatcactcacatgctataaaatttactcatttgcagtggtttttagtatatacagagagttgtgcaatcattgctattatttaattccagaacattttcatcaacctaaaagaaacaaaccccatacccatgagcagtcactccccacacccctccttccccagcctcagacgctactgaactgctgtctgtctgtacggatttgccccttgtggccattccatctaaatgtgctcatacaataggtggcctttctgagcccgtgtcatgctacaatagtgaacccctatcctattctatgacagacatgagagtgctcagaacctgaagagttggcattatcacaagcgcatccccgtctcccccaaaccaggcttcagtgccagggcagacatgggagacctgggaagcctgcccccagattttgctgtcaggcattggtgagttttgtgtccctcacaagtgggaatacattcaaaagacccctcccaccaactgggatggtgaaaagtataaaggacagtctcattctcagtgccatttagaatagggcagttttgatgaggagcaaggtgagtttcttaggtggtgtggctcttctcgaaatcaagggagctggagctggactcctgctatatcccttgctcagaactctgtactgcctggatctgatcattagcagagtctgcgccacctgctttggctcttggtccaaaaaatttgctgtatccttggcttagctactctgtgtccttgagggccaggaggttgccttgaagtccatgtggttcctggttgagtcactgacaaataaagtggccttggtgcttaccagggcccggggagaggagacaccatggtaatgacctcagacaataaacagaccattgggattggactgtggcctccagtgtcttgctgactcctgtcttggaaccaaatgcagaagctactttgtcctgcagctgatgggaataagctgccagcagatattttggtgcctagattatgaaaggagagtcaatatgtaatccacgggtataaaggtcatcacatggtccgagtctaaggcgatggtgttatttgtgcttgattggcggaatcttatgctgactgcttcttcacttcaccatttagagagtggacatcacacattagtcaatggcacacatttgggtttgaagataggttcaattgtatctccgtgttttcatgacatcttagagatcgtccgtccttttcactcatgaggctttggggtggagatagtaaaggtggctgatgtccctggatgtgagtgtgctagttcagcatgggacctcaggcagaaccttccccacgtgagccccagtgaccttctctgccgagaccctgcctcttagaggtgtgaagctcaaaggagatcatgtttctgaatacattttgcaaaggtggcaagggctgaccgtaaaagccaggcagtcagaccttcctgcctgtgaagggccaagatgaagtctctcttttgcttcgcagatgagaaaattgactttgctcagtgggagggatgtctgaccatctgaatctggggagaatcattaagtgcccattatgtggctgtcactgtgttaggcagtttgacaagcataccctggagcctgggagggggagtggtggagtggagtgagcttaaggactggaacagaagcccttggtgcatgcctgggcgctgtcacctactgactatgtgaccttgaacaaggtgtgtctgtgtatgtgtgtgtgtgcatgtgcgcatatgtgtgtgtgcatgtgtgtgtgtgtgtgtgtttgagatggagtttcgctctgtcacccaggctgcagtgcaatggcgtgacctcagctcaccgcaacctctcctcctgggttcaagcgattctcctgcctcagcctcctgagtagctgggattacaggcatgtgccaccaagcccggctaattttgtatttttagtagagatggggtttctccatgttggtcaggctggtctcaaactgccgacctcaggtgatccacctgccttggcatcccaaagttctggaattataggcataagccactgtgcccggcctctgtgtgtgtgttttgtagcaacttctctgtgtcctgatagccacaggggctgctgtgaggactaagtgacgaggtgtatgtcaggtgcttggaatgtcagtccatcccacctcctgctctccccactaggctgccacctcctcctcctccattaccttttgataggtctgattaccttcattttacagatgactctgggtcactcttcatcttttgtagaaatacctctgtagcaaatgtcatggggacattctcatctttggtagcagggagctcactgcctcctaggtatgttgttccattttggaatagcttcatgtgaatcttagcatgtgccaaggtggatgtggagtctttgcatcagaatcctgaactgctcatcctgaaaaaatgatgcgatcagcctgcttcccacagcgtatgctcagggtgacttcttgtgacatggagatggttggcagtgagctttctcttgtgacttcacacagggacaagtctgtggcattttaaggactagtgagagttcaggatggaggtgaaggagattggcccagagagctacagagttgaggagaggaggggtggcacacaggaggacggaccatcaggggctcaggctggcggctgaggtgggagtggtgtcattatcttccgggtcccaggccttgttcctcctgaccctgaaaggcagtattgggtagaggcatccccttgttttgcagacctctattaaaacaaaggagaacaatcatgtaatgatctctctaattgctgaaatgacattcaatatgatccagtaggtgcttcatgatcacacatcgtcaactctgcgcagtgggaacttacttaatctgaagacagatagctactgaaatctctagcaaaccttattcctgatagatagacatgagatgcaatcccttcaggttaaaaagaagacaagaacgcccactatcacctctcttattcaaccttgcaccctaggtcagagccagcgcaataccacaagagaaaaccaatagagacataagtcttggaaaggaagagatgaaggcatcattattttctggtgcagccatcatctggctggaggaaatcgtagactccgaatgtataaattattagaagcaacagagttgagccaggtggccaaaggtcagatattaaaatgcatattaaatgcatttttgatagaccaacagcaaataattggaaaacacaatagaggaaaccaaggctccgtgtggggcggggttttgcattatccagtgaggcatccacgctgctgattctctttctaatgatatttgtacagcatgataaagcagtatcgtatacatccagcccactggggcaaggcagatacctttattttgacttttagggaggaagaaccagaggctcagaggttagagcacccttgcccaagctgactcagtgactaggaggctgagctggggcctggccccctggaccaaccctcattcctttttgctgctttctacccaccccaccttcttcagaccttactttctccaccatttgtcttgttctgccagcttttcgttgtctgcctctagtaccagctgagctgggtgggagggagagtctgggagtgttcggatttgggttagcatctactctgtagtgtctttcatgagccacagcctgaccttcccaggacgcttgctgcactggatgcggggcagggatgggttcttctgagggaggagagagccaggcggttgtttggcgtggcctgggtccctctctctttgcgttgtctcccctcccctccacactgctcctctgagtctgacttacatctttgcttttttgttttatttaatgtgtgttcaaaagttataaaaatagcatatgttcacagcaactggtggaatcataatatggagaaaaagaaagtctttcttatttactgtttgatggctctcggatgccatgcactcctctcctgcagctttcctggccaagtgcttagggcctagggtggacccttccacttatttccccaggcccgggtcaagataggcaaacaggttttccattcattcagcaaaaatttgctggatatttactgtgtgctaggtgctggggatgccacagggaacaagacagggaaaaacccttgccctcttggagctgacagtccaggggattaaaatattttacagtgggccgggtgcagtggctcatgcctgtaatcccagcactttgggaggccaaggtgggcggatcacttgaggtcatgaattcaagaccagcctggccaacatggtgaaaccctgtctctactaaaaatacaaaaattagccaggtgtggtggcacacacctgtaatccagctactggggaggctgaggcaggagaatcacttgaacctgggaggcggaggttgcagtgaaccgagatcgcgccactgcactccagcctgggtggcaaagtgagactcagtctcaataaaaatgaaaacaaaacaaaacaaaaatatcttacagagaagtgaatgcagccaatgataagtgctatggagaaaaataaaacaggataaagttcctccctgttttgtaattttaaaggagggatcagggtagaattcactgagaaggtcagttttgcacagagaccaaaaggaacttgggagaaagccatatggctttctggggaaggagcactgaggccaagggtaagtgcaaaggccctggggcaggatgtacctagaaatgtgtcctgtcaatgggacagagcagagcatgtgacaggaataaaggcaggaaatgaagtcacagaaggaggggaaggaattggaggagggcagattgggtagggccttgtgagccttgtatatggcttttcagttgtttaatgaaaatgggatcttattacattcttgtcccctgcctcttgcttttctttttaaatttcaatttattattatttattgatacataatattttacctatttatggggtatgtgtgatatttgttacatgtgtggaatgtataatgatcaagtcagggaatttggggtatccatcaccttgagtatttatcatttctatgtgttggggacatctgaaattctttctcttctagctactttgaaatatgcattagaaatatacaatacattgttgataactacgtttttcatcctgaacatctctcctgaggcaggagagatgagatctatatcttcctgtagatatagatctcattttaaaatataattacagaattttcacggtatagaggtaccataattttttcaatcattctcttttgatggactttcaggttgttgtcagggtatggtttctttctccactacatctcatatatgttgcctttcatgctggtgttgagagagcggaattcctaagtcaaaaggtgtatgtctatatagaatattaatagacactgttagatttcgctccagaaaggttgtcgccaatttctctgatataattctgttcctaagtctcagttgcctggctttgccctctagttgctaaatagctactctgcaaagaggggaagtcacacctataaaaagagatgtccctggaatccttcatcccgtgggaaggtgtgtggccttttggcatgtgctgctgggaacaatatcattcgctcttttttggagcttgtatttgatggctgtgacgtcaaaatagccaagaagatgaaaacacagctgttgctgtgttatttgcattatggctaattttccatatgtttaaaataagcacaacaccaaggaactgcatggaaacagattcacaccttgtcgaacattggattgtgctcccgtagcatcttaaggataatgcttccccatagcatcccttcttgtgcgcatgtaaatcctggtacaacctctgtgggtatgcgcttgattgccagttcccccaacccccaatctccggatgttatggagcaggatcgtgtaaactttggggtagacttttcatctgtttagtagccaaatgtatttgtgtgatttgtactgttggacatttaggccatgtcccatctgttgcacttcaaacaatgaataatcttgtgtatgagtctttttatgcatgtatgaggatttcttttggatagatttctagaagtggaattgctgaattgaaagggacttgccatttacaagttgatagatattatgaaattgatctctggagaggaaccagtgtccctgtccacagatagtacaagtgagtgccttttccctgcttcttcggcaattcgagatcttgccaccctttttgatttttgccagtctaatgggtgagacgtgatttattttgtatgagtaagggtgaacattacatgtttgggggccatttgttttatgtttgtgaattgtctttcatgtcctttgtcccccactttttttctagtggcttattagtctcttatgtggcccagcatggcctgtccacattaggagggcatttgatactgtgattggataaactaacctatctgggctgggggcagtggctcacgcctgtaatcccagcactttgggaggtcgaggcggatggatcacgaggtcaggagttcgagaccagcctggccaatatgggtcagaaacccagtctctactaaaaatataaaaattagccgggcatgatggcgcgcacctgtagtcccagctacttgggaggctgaggagaagaatcgcttgaacctgggaggcaaagattgcgccactgcactccagcctgggcaacagagtgagagtccatctcaaaaaacaaaacaaaacaaaaactagcctgtctggctagttagaggttgatccgcgcttctttattgtcaggagtgtaaatctattaataggtgtttgagaaaaggaagagcacctcagcaacaatctagatgggagctgcattttggtgtgtgctgtactgactgttccacaaacaggttgaacacagacgtcacagaactatggggccccgaagtccatgtgccggggtacatcttttatatggtctcatttttatcctattactgggtggaagaattatgaggaaacttgactgtttgctactaaaacctttttttttttttttttttttttttgagacagagtcttgctctgtaacccaggctggagtgcagtggcgtgatcttggctcactgcaacctccacttcccaggttcaagtgattctctggccgcagtctccccagtagctgggaatacaggcgcccaccaccatgcccggctaatttttggattttttagtagagatggggtttcactatattggccaggctagtctcgaactcctcacctcacgtgatctgcccgccttggcctcccaaagtgctgggattacgggcgtgagctactgcgcccgaccactaaaacctttttttccactcacttgaatttacaacctcattgtgagattttctaggcagctactccactgggacattttgctagtccaggtggcctagctgctgtagcaagcaaccctcaactccagccatgtaacacaatcaaagggtgtgtctgtggctctgccctttctaggtacccagaatcctcctctgggtcttcagctggcagaggagaaaaagagggagcaggatcgtgtgtgaaggctttatagagcagatactctgcccacattctgctggccagaacttgatcttccagtccatctaactggagggaggctgggaaaggccagccatacgccattgttatcagtcctgaccaggtgcttggtgaaccatggtctcttagtgccctgtgggacttgtaagtttttgaagtgtcttctcaagtgtgatctcactccatcctcatagcactgacaaccctatgaggaagtaagatgagtgcttctaactcccagttcagaaccgtggagactgaggtctagggagataagtgtcgtgggcaagggtaggcacttaggtagggacacaaatggtagggagacggggtttgaacaaagagctctcatgctgactggccccatccgacaggacacaagagcacccactctgggtgtgcctgggtcaccctctgcatgtagtgggcatgggagaaaagggctgcttagcgaggggaaattggtggctggctggagtgcttcttctatcctagagtgtggcaagaaaggaagttgtctcttgccttttgcaaattgcaaccgaatggtgaggggtgacagtattgctactggtaggaaagcttggatggcagggacagaacggctgtaaacctggcacctctgggggagctgccccctcaccttgactttgaccattgtccctttcttttcactttcatgggacactagcgttgaaaaattggggcctttttcttcacactcccatttctctttatttaattattttaaaacatctgatgctgcagtgagatcagctgtgatacatcatctgttctattttgagctgcagggagacaaatggagaatactgctacctcccctcctggcgaggactgtgctcccaggagcccaatggatggaccgagccaaggcagctctgggcacaatttggatgctttcccctccaggggaatgcctgggtttccttattgtgcagatgccttgaactaacctggtcaaaaactagagagacaaaatcacagatggttgcacaggttgttggagtagcaaagacagcaccaagcagcagaaagaagatgaggcattgagtcctacgctcagggctgagcaccgtcactcctaattgaatggccactgaactttgtttcctcatctatgccaaagaaataacatttttcctaccactttcactgggttcttatgaggatcacacaagataatgtgtataaaaatgctttgtaaatggaaaagcactctgcaatttaagacattattatattaatagtaacaattaccatttccaattctggtgattcacttggggtaggagcccatagatctcatcactgctaccattactaccccacattgtacttcaaagctgcaattaccttgcacaatttcatttgatacattactgattatgcagtgttagaactggaaagcatcttgaggattaactaatccaaatgtatcgctttatagatggtgacctggcgcctggaagggagagacttatttgaggtccctagaactcaggactgtgggctgtcattcctagggagtaggctgttttactttggattatggttccctgtcctttctgaagggctagacatgggaactttgggtgggacgttgatccttagtcattaggtggagtctcagcctgactcatgtctgcttactcacgtcaaccctgctctgagctccactgctcaaggttctgggcgcatgtggacagtgcttagaggagaagctcacatgctgagaagcttgggcacagggtcaaagagaggagaaagtaggaactaaagtggtttgctggcaagaaaaagagaccagggcaattccagaacaaagaaggtggaggtgctcctggtctcaaccttggtctttattggaccccactgcctttgtgcgctctctcttactgtccactccaggggctcaggctgccggggcacactcagtgggcacagctgcaggactgtgaggcctcctctaaagagaagactgagggtcctccagcattattgtaagtgttcaaagcgtggtcagaattcatctggatagaagaacaagcacaaacgggtaaacatcctggcaagactgagtttggcctcatgtcattcacagtgccactggttggcccctttcctgcctctgggtcttgcccaaatgtcatcttgcccacatgtcacttctctatttaaggatgccaactgcacctcacctcttatttggaccatctttcccaactggatttgccatcaaaatattatacagaaaatttgcaaattagtacagagaattcctgtctacctgttagccagtttcccgtaattgttcacatcttacatcactatagaaaagaacaagtttcatgttggtctaaaactgcatgtcaaactttaagccttcctcaaatatcatcacttttcccactgatgctgtttttcttttccaggatccagtccagggtcccacattgcatgtacccaccatgtctccttagtgtgcttttgtgactcgtctttccttacctttcatgactttgacattggtgaagagtgctggttagttattttcataggcggtctgtatattttggtgtgtctgatgttttctaatggttaaagcatatgggtttttttttgttttatttatttattgctattgattgggtctctcctgccactggaatatctgctccctccgagcaaggattctcattggtctcgttcacttgtgtgcaggaacatctgtgtgtgcctcgcacccatgctcagtcaatatttgctgggcgaacgaatgagactgaactcccaggcattagtggagcatctgacctgacctgagagaaacgtggagaagctgggtcctggcagagccttgatgggcagttgggctggatgggcactaaagcctctttcagcattcaggttctgtgattttgtaacctgatggtggtatctgaactcaagctaattaaattccacaggtgtttgctgaggaagtacttgctgtggcatcctgggctgggcaaggtgggggattgatgggcatgtgcgatccaggctctgaaatgcaaccacattcccagggaagccaggagcacagggattgcatgtaaaacacaggtgtccagttagtggtttagaatctagactttggattagtggctcccaaaccacagcctgctttagaatcactaggaggacattattaaaacaccaattgctgggtcccaccctcagagtttctaagttgcttggcctgggtggggcctgagaacttccaacagcagttccagcaacttcccaggtggtgcttattgatgatgctggtctcgcaaccctatgttgagaagtattactctagatgttaagagaacacacaatttactgctaattagcaagagccaggagggcttcctggaggaggtggtcaggcttgagtagggtaggattttcagaggtgggtctgaggcttgaatctatacacagctggcttgctgccaccacatgcgatctgtggtgccttttgcctgcctttgccctgctggcacctggcctcactcgtggccttgtccaatcctcttggtacatgagtgatcttggccaggggagtctgagcccccagaggaggaggctgactaagccttagaatggagttgaccttggctggctgagatgaagtccctctgaggcctggacgtggcctgcgctgcacagcctgccttaatgtgtttatctgcctgggccttgctcgctgtctgctggcaccatatgaggtgttgctgttgagctccgtggctctatttctgttttctcgcctggcaccagcacagcagggcagatgaggtgtgtggccacccttggtttcttcctggctccaggttcttcttgaggtgggcatttggtcaggaagaacatttgagtctcgctagagtgtctggtacagaagcagctggacctttttcaggagggagaggttctgggaaggagggagaaaacctttagaaatttaaataaatttagacttagcatctggcggtggtagtgagaggtgacagcgtgctggcagtcctcacagccctcgctcgctctgggcgcctcttctgcctgggctcccactttggcggcacttgaggagcccttcagaccgctgctgcactgtgggagcccctttctggggtggccaaggccggagccggctccctcagcttgcggggaggtgtggagggagaggcgcgggcgggaacaggggctgccagcggtgcttgcgggccagcgcgagttccgggtgggtgtgggctcagcgggcttagcacttgggccagcagctgctgtgctcaatttctcaccgggccttagctgccttcccgcagggcagggctcaggacctgcagcccgccatgcctgagcctccctgcccctccgtgggctcctgtgctgcccgagcctccccgaggagcgccgccccctgctccacggcgcccagtcccatcgaccacccaagggctgaggagtgcgggcgcacggcgcgggactggcaggcagctccacctgcggccccggtgcgggatccactgggtgaagccagctgggctcctgagtctggtggggacttggaaaacctttatgtctagctaagagattgtaaatacaccagtcggcactctgtatctagctcaaggtttgtaaacacaccaatcagcaccctgtgtctagctcagggtttgtgaatgcaccagtggacactctgtatctagctactctggtggggacttagagaacctttgtgtctagctcagggattgtgaacgcaccaatcagcaccctgtcaaaagagaccacttggctctctgtaaaatggaccaatcagcaagatgtgggtggggccagataagagaatgaaagcaggctgccgcagccagcagtggcaacccgggtccccttccacactgtggaagctttgttctttccctctttgcgataaatcctgctgctgctcactctttgggcccacgctgcctttatgagctgtaacaccgcgaaggtctgcagcttcactcctgcctgagccagcgagaccatgaacccaccagaaggaagaaactccgaacacatccgaacatcagaaggaacaaactccagacgcgccaccttaagagctgtaacactcaccgcgagggtctgcggcttcattcttgaagtcagaccaagaacccaccaattccggacacagtaggatgtacacacactttgtgcgtgtgtgtgtgtgtgttcagccttccaggatcatttaggaatttttattccttaattgacattcaaaacttgatggtagaggtgaggagaggcccagggagcttgggagaggccacgttgtttgtgcagttggaagactctgggcaggaaaggagcaccacatccaagtcagagaacacgggaacaagaagggccgtccatgtgcttctgattcagccccatcgttttaactgagacctagaaaactaagtacttgtcctactccagtgctgcctccccagtcatccatggccagactaaattactctatctttcctttgggctgcaaagtcgttttatttataacacacctctcttgttttataagtagccatgaaggggtttgttttacccactagattagggattggtacattacaggtcgaatccggcccactgcatgttttgtaaataaagttttattggaacacagatatgctcatttgttcgtgtattgtgcatggccacttttgtgctatgtcagaggtgagcatttgctacagagactaactggcctgcacagtctgaagtattcactatccggttcttcacagaaaatgtttgccagctcctcccctgggaggtgagctccctgagggcaggaacggcactccgtttatcttgctgcttcttgtttcttgctggtagtaggcactcaataaatgtatgttgaataggcttgaaatgcagtggattgatttgtcaaagatgagcgccagccacatggctgttctggcttccccaggtttcctcttgctgtttggccactttgtgctccagttttctctctacagaaagaagataatattatctatcttgctgagttcgttgatctgtggtgagggtagaacaggatattaaaatatcttactagaaccttgggcccagcttccggtcttcctgatggtttcaatccaggcctagcacgggacctctgtctaaaattctctgctctcatggccctgccattcctgaggcaccctttgcctccaggctaaagtaaacacctgtcattcatgatcctccttactttgatatgataaaatatcagggcccagactgcagtcccacggccctggactccagacctacctgtctgtcttgatctctcaatcctctagggcagccttctcctacatccagaattttctgcattctgtcccctacatgaatattgcacttgttcttgggaccctatccccctctccctcctaacttcctaccttgcccctttctgcctttctgctctcagcctcctgtctgcccttgcaggtctcttttatgtctgaccttgctggagtcctttgacctcggccaacaggagtgactgtctcatttgccacttaggcactgtcttaggttttaaatttttaatctttgtggctgcttgttaaaaatacagggacccaggcttcattcccatggaattagaatctccaaagatgtgatccaggcccctttgacttttaataagctcctaatgtggttgtgattatgatcaaagtttgaggaagactaacttaaaatagagtgctttgcagtattatttctctttctgtgggactctgcttatgtctccaaataaactataaacatcttgaaggcagatctgggccttattttcttttcagagtggcacatatatctgaagactggggccgtgagatgatctgtcggtgagataactccacctggggccctgcatctgataggcgctcagtaagtgtttgcttgttgatcaataaaagacatgaaagcacctgggaaagcaaaacagcctctgcaaagcagggcattattactgggagcagatctgatgtgtaccttccacagattccactgaaggtgtcctcagagcaccggacactcaggggcccgcagcccagacacagaaagtccactctgctgagaaatgctcaccaagcagaatccctcacactctctagctttgttttctttgatctctctgagcttaggaggaaaggctcctgttccctccctcttggcttatcccaataatgcaaagccatagaagtgcaggctgctggggaaaagtttgtttggacacttaagaatgtagaaaagggtttagcttgtataaagagttttgctttctcattataatgcttggagagaagtgcaaatgtttcatctccgcctactgagttatactgcctgtttacataagcctatattcagtggcctgagaaaaggcttcttgccttcttcagggcgtgatggtgcaatcttggtgtagagtttccaagcagagatgatgctacggcctcacgtggtgggaaggctgtgtggcaggaagaataagttcaaactgtgctttgtttagaactgttgtgcaaagttgtttcttccatccaagtattaactgggccagaccctgcttagctgccaagatcagacaagatcaggtgtgtccagggtggtatggccgcagataccaagctatttctaacacaaggatgctctccttttattgagcagggagaagacagcacgtacagaccaaccatcctggttgtaaacttgtgtcctagtcagagctctttctagctggagtagaaaattcttaggctgtatgtaatggaaagagagtggagtccagcaataaaaacagatcaggtaaaaatagagctaggagtcaatagtgagggctgagttaggagagttctctgtacttccctagagatttccagccatctaagcatacgtgtgagttcttgctttgacaaataagtactccactggtatgcacatagaaacttctttcacctgtgggatcattattaacatgttttatgtggagggaaaaataaagattttagaacttctttcttccctcatgttttcactccattaatattaggcttaattattcaaatttattatattagagtcttattgcttaatttaaaaaattgaatggattattagctttttaataaacagtgacatttactgtctactaatgagggctcaaatcatgtaatttattgctgcatctctattttgttcatgaaatgaaacagaaattactacctacttgaaactggacttgttttctgcgctcctatgaaactgaacagtggagggttgctcgtgaaggatctgggacatgtttcatatggagcacaagaaaaggacgtcgaacatgcaacggtctgcatccaggtgctagaaccattttgtttttcccttcatcatccctagaaccaagagtgtgggtgggaatagctcagtagagtgaccatgtgatcctgtgttacaactgaagacaaaatctggcacagagtctctccagtgatgactatgaaactgactggtgccccatcagattcagaagtggagagtgttacatactgatttcagaaaaatgttagataaacattgggaccctttattatataccgggaacagaaaatgcatgttgataaaagtttgggatgttccatttcactctgatataaagtgtgcgtggtcagattggtttctatttttgataaaaatgaggttctggaaagccattctggctcatgggcttatgagaaaaaggttttggaaaggagttttggagtgctcccctacagaaatagcactgctttttaattgttctgtcgctagagccttggccccaaataacaatgcatgaatctcagtatttgtcttcaaggagctgtggtctgataggagcatatagtatacctatatggatgggtataactgaaggtggtgaggacctgtttttagatgcctgagaaatccaaaaacaagacagggaagttgttcgtctgggaatcatgaagcatgtaaacctaattaggggaggtggcatctgatctcatccttgcagaatacataatttttatacaaacaatgttgaagaggtgatgagaacagaaaagctgggtaaagtgcagagcatgttcaaggaagggttacaaacatttcttgagggcctgccatgtgcacagggcaccaatctagtgaaagcaatctgataagagcttggtacaaaaccaagtaatatagcttgtgcattaccttcactcctcttactccagtaatttttgagtaaaataaatgttgtctttaattatattaattcatacaactgcgacaacggcctggtgaaatcagtaccatgcttgtcctcatatgagagaagaggaaacagacattttaagttaagcgacttgcttcaggtcacccggctagtgcgttgtggggctgagactcaccccagccagtctgactgtgcaggagttgcagccatttgttcctctgttcacctcccccgatagtctgagtggcctgagagcaggcatgtgttttcgtcctcttggtactcctgtcatccagcaaactgcccagcatgtggtcagagttcagtatgccaagtacaaaagatctgctatggagattcttaagtgatcaatgggttttgagggacagcttggagaagggtagggaggttgttctggggtcagagaagaacgtgagcaaagggctagagtggctgagaggactgtgcagggagtgcatgctccagtgtcccttggccaggtgtgtgggcttcccatagggagctggaggtgatgctggaacagcgtgctgtggaagccttaagtgcagccgagtgctgggttctctgtgagacttcttagggtctggaagactgggtcagacctcagcctcctaggtgatgtcagacagccaggccttctcccagctcactcttgagtgtctctgtcagagacagagtcagagactgaatggcgtatgggctggatttcagggagcatgttcttctttaaaaacatttatggaacaaggccaggcgtggtggcttatgcctgtaatcccagcactttgggaggctgaggcaggcagatcatgaagtcaagagatcgagaccaccctggctaacatggtgaaaccctccctgtctctactaaaaatacaaaaattagctgggcgtggtggcatgcacctgtagtcccagctactctggaggctgaggcaggagaattgcttgaacctgggaggcaggggttgcagtgagccgagattgcgccagtgcactccagcctggcaacagagcgagacttagtctcaaaacaaaaacaaaaacatttatggaacaacttaaatgtaccacattctgtggctataaagacaaataagggcttcccacaagtcttacgtatatgttggattgttggtgcttgttgctaggggaggacgagtgggtagtgaataccaaggccccgtctaaggtggttgggtggttataaagcactgtggactgacggtgtttctctgaccctaaggagctgactggcagggtacccaagtcctgctcactgcgtttttgtaactgagctaagaactgaagaaatcaacaaattgccaccaaatcagatccttagtaatgcgtgataaagcatgacatatgaaagaggacacagaatttaatcatcttaccccataaatccagccccctgcaatctgtctcttgtgtgaataagacttcaatttacagaaatggaaagttccttttttatctacatatggttatacctcctttcctacctggaaggcatttccttgtatttccttcctgagtagtgatcaggacttggggttgggcaccaaagcctttaggaagtggagttgggtgtgttggcctctcctgttgagtcaggactgaggctaggcctgaaaggtaggtgacaaggttgaagccccaaaccactaagaatcaacacccacttcctcttcatctgctctgccccaggccagggaggcaaccctgagacccaggagtaagctcaatcctgctttacttgcctggaaagtcaagtcactcatcagaggaggaagagtcagtttccctcaaggatgggctcttggtcatgaagctgactgctgttgtattactcagatttcagatcttagaaaattatagcagcatgggctttgaaggccaaatacatgatcatcacctccttttgagatgagactctcctggtatgacatccagtactcagagatgccatatgccttctggacttgtgtccctatgtgagaaatattcaaccatgctctatcaagtctctatttgtcaggacctggattccagcagccatttgtgcccccgtccatctttctgtgaaactgggccagtgatgcattgacctcatttctgatgggcttcatagtgggactagttgtggtcagacctgcataagactgaccaggaagaagcccaacctgggagtccaaggagcagaagcaaggttcaggaccagggaagagcaggcagagctacaagggccaggctctgagcagtaagagattggcaagagcagccctgctgatgagcctgtcacagaggtaccatgataatcctggaccagtgagttatctttgtagcacaaagaaggttggaggcacagattgctgtggactgaagtaggaggggagggagatgctctcgtaatctcatgttgcctgagtcagctttgccttgctattggcggatggggctggtggcctgtcatgtgtgcagatgagtcagaggaagtgggccctccctggctggtggcttgccccatgccttggggcatagctaagcagttgcatgtctactaaacagtcttatctggaagcaaatatggaaccaaacacctgagcgtctgccaaggcctccaccaccaaggtcaagaagtcccccgaggggcatggctctgtgagctgcccttgtaggtgtcctggagaagcaggcacttccttgcagttggtcaagaagaggcaatacttcttgcttgtgttagggattttagagcagcggatttagggcatggcaaggttggggctacttccgggggaatgaacattttttaaaaattttactttaagttctgggatacaggtgcagaacatgcaggtttgttacataggtatacacgtgccatggtggtttgctgcacccatcaacccgtcatctaggttttaagccccgcttgcattaggtagggaatgagcatttcttcaggtccctaagcagagcttgaaaatgatgatatcaactttaatcactagcaattattaagctcctcttccacatatattaagttgtttatgcctcataataaccctgatgcaggcatcattatttctgttttacagaggaagaaacaaagatatgaagaggttaaataacttgccaaggccaatcagctagcgagcatcagagctaggattcaagcccaggcagaccagctccagagcctgagctagactcaatgtcagtgatgatgtcgttgaccttcggggacagattctgcttttgccctggtgggtctgggttgagatgcattgcatttgatcttgctggagaaatttccagtcttctcagccctgggaaaatatgtatattggaacctcagagctacaccctgagggtatgtctcctggtttgctgaatttttaaaaagaggttttactctatggccagctttcttgccaggagatcagagaccgatgacagctggcagaatcggcctctgttccagctgtctcctacccttcctaaaactcagatgctctttgaagctgtcttcctccattgaggagcatgtgcttcttcagtgacagccggagagtgggactgggctggcccctgtccttctaaggccaccacctgcagcactcctagtcaccgttccaaggtcactgtggaggaaacagaagtggccgagagaggaaaggtgcttctcaaggaggctgagagtggagggagtaaggcaactgagcacggcagttgggtgggcccaggccaccaactgtttgtcctgcctgagttaagagtccagaattggggctgggtgtggtggctcacgcctgtaatcccagcactttgggaggctgaggtgggtggatcactaggtcaggagatcgagaccatcctggctaacacggtgaaaccccatctctactaaaaatacaaaaaattaaacaggcgtggtggcgggcacctgtagtcccagctactgaggctgaggcaggagaatgccgtgaacccgggaggcagaggttacagtgagccgagatcacgccactgcactctgcctgggtgacagagcgagactctgtctcaaaaaaaaaaaagtgttgagaattgggtatcaaacagagcctggtgtctgtcctggctttggcttttagcagcctggaatcaaatagccacttacatgaaatttctaacactgtcatggatggcaggcaggtgctggagtcctactgcctgcattacccctgatgtcaccaccagtgagccgtgagacctgagtgagattggctatgtaacttgcagggtcctgtgcagaatgcgaatgtagggttcctataaaatgtatgaagaattttatgatggtgatagcagagcattaagccaagcatggattcttcccaggtgtggggacctgtatgatggcacaggttgtactctaagcctcagtttcctcatctgcaaagtggagaaaatagtatatttcccataggcttgttgtgaagtttaggaaagataataatgcatataaagtattgggccacatggtaagggcttgatggacaccagcatttatgagtgcagggtcagaaattcacagcttctttttgggtcattggcaaaagatcacggagagcaaaggtacctgcaacagtggtttagcttcaggaacaggtctggactttggtctctgcccttggctgctatggcttgggactctgacctcttttgcaaagcacagatggctcttctgcaggagcaagaggcccctcatcacatgcacaggccacatggatccagagacacctacctcctagaagtgtgtgtgggatcctggggcaggctgaccctgccctgcatttcccaagtcatgggccaggaggaaggcagtagagattggagctgtttttgatgcgttcattttttatttgctgaaatatgttgaaagtcagttaccaatatcacaggatttcatccctagagattttagtttgcatttctgaaaataaagacatttctttttttttttttttttgagatggagtctccctctgttgtccaggctggagtgcagtggcgccatctcggctcactgcaagctccacctcctgggttcacaccattcttctgcctcagcctcccaagtagctgggactacaggcgcccgccaccacgcccggctaattttttgtatttttagtggagacggggtttcactatgttagccaagatggtctcgatctccagacctcgtgatctgcccgcctcggcctcccaaagtgctgggattacaggcatgagccacggtgctcggccagacatttcttatatatatactataatcttattgtagacattgaaggtttttgtttgttttctggatttattaaggatagcattttatggaaagttagctggatatgtgtggggagggaaagtgattagtattaatctggtttgctaggacgagaggctgttatccaaattcaaatttggcattcaattcaattgctgttcatggaagaaacatccggggacacctgcctcactgccccaatgggtcagatggaaatcactttctaggggagcttctgtgactcatttcctttgctgggatcccttctgtcttccacctaaaccatcacaagggcctcctgagggtctcccagcctctggaataacaccttcactggtccgttctttactggccaccagagaggcctcttgaagacgtaacccagatcttgtctttctttttcttaaaacctcccaaaacttccccattgcccacagcaggagtctaccggccacttctttttgtatagtccatgagctaaggatgggttctatctctttaaatggttgaaaaaaacaatagacacattatattttcgacatatgaacatgataagatattcagattcaaatatctataaataaagttttattgggaaagagccatctgcattcactgatgtatcttttatggctgctttcaagcttaccgtggcagagttgagtaattgtgacagattgacagcttgttacagagaagtttgcccacacctgagctgtaggataaaattcaggcttcttcgcacacacctgtggccatttgtcactgacacccctgcctccctgatccctcctgctttgataaccttccatgctcttagcaactcccagctgccggcagatgccctgcatgggccatttccacctctgtgctttgccccttctcttctctccatccttgctgcttccttggctagacatcactgactcatccttgaagaaatccccttctccaagaaggcttcctgacctcccctctttccctttcatcctgtttggtttagtggctccctccctgtttggacaggaaaaacagaagcccaacgactccgggaggttggcagctgggcgctcagcacagagaaaggaggcctggggccaaaatggctcactgagtcagcagacccagtgcctggtatatgccaggtgctctagatgtgaagagcacagatgcaggccctgcctctgtggggctcacatcccagtgggagatacagacagttaatgcacattttaacaaatatataggggatgagagtccatgtcttgggagtgccctggccagtggctaggaagtggtggcaggtggattttctagataaggaacccaggaaggcctctgaggaggtgacatctgagtcccgagagaggcagagcccttggcggctggatactctggagcgagagggaagatgagatctctttctttgtcctcttcaggctccaggaggtggtgagaggttgtcacttctcttcttccaggctcacagcaccagcagcctaagagtttacaccagactttcaagtcagagtcctcctccctcgttgggggctgcaggcttccctcagacccttctctagagggcatttgatccctaccacaggacttaactggaagcccctttttgagatctgtgagatgtctgggattttccggccaagaaggacttcagagataggcctgtcttcatctcaagaagcaaagctgaaacccagagcagttgagtcccttggccaccgggctgatcagcggcacagccgggaccagagttctggttttctgacccttagagcatgagatcactcatcttcttctgatttaattgggggatctcaggacagatcagccactagaattgggaggaggccattaaaggaaccccttgggtccacacaccactcaggagaaaggcccactggtgaggccaaactacttctttgaagaggcttctcttagtatcaccagtggtgtgttgctggaggtgtccagaggcactgtccgaagctgctggcctctaatcccaccagtttaatttagctccagtcctaggggagctttgctaattatagctagctggccatgctgggagctataaatagggcaggaggcacctgtttggtccttactggatgtttatcaaggtacctgcagaggatttggccactggactgggtgcaatgtgggcacagaaagcaccttgaactgtgctctttattcagtttaggcaccaaagccaatgtgaactgtggagggggcagggggatgtcaccagcacaacctggaaaccagactgtcagagttcaaattctggcttcaccaccaactagctgggagaccctagttacccaagctctttgtcctttagttttcccatctgcacaatggaaatctagatatttacaaagaaggctgttgtgaggatggaatgagtgtatgtttttatctatacataagttacgtatgtgtgtatatatgtgtatacacatgtagtttagagttgcctggtgtattaagtgcaattatattgcttgatgttatttattaccatatgaaatggcctgaggacgggaccatcttgcatagaaacctggatcttggaaggaggctgagtctcggtctctcccggtccttgatgaggcaagttaagtgcctcatctttaggcagttaaggcaagttaactgcttcaactacatggcagttaagagagtgtgagccgggcgtggtggctcacgcctgcaatcccagcactttgggaggccgaggcgagtggatcacaaggtcaggagttcaagaccagcctggccaagatggtgaaacccccgtctctactaaaaatacaaaaaaattagccgggcatggtggtgggcgcctgtaatcccagccactcgggaggctgaggcagagaattgcttgaacccgggaggcagaggttgcagtgagccgaggaaagaaaaaaaaagagagtgtgtaggctcgtcaacatggggtcagttactgctgttacctcctgtttggcatgctacttcacatctgtaattctccattcttctccattctttcctgttaaactgtggtgccatagcaatgagcatttcatgggatttcagtgagaattgaatgaaataatacttgcagagcatttcacacagtgcctaacacatggtgcatgggaaacagtgtaagccattgtcgtccttcctcctcccgttaaatgacttggacaggttaccagcatctcgaggcttgatatcctgtagctctctaggctagagaatgggaccagtggcttagagggcagaaggctagcagtcctgagacccctggcctgcagatgggaactggatcttcttcctttgcagtcttcttgttccagctgttagcgtcactccttttagaatcccatggtgagctttcttgcacggctgtgtgcttcctgtgtttctgtcattgtgccccagctgggtcccaagccctgaggaccatatgcagcatgtggtggacacttaggaagcacgtctccagtggaggggacttaaatgtcacgtagtactgccccatcaagtgctgggagaggccgagagtccgcctgcttccaagatccctgaggttttgtttgttgtgacatagcaagaggagttaaaggatgggggattgtttcgtagggagaaagagaggctaagaggtagaggtggggacaggatacctgggtgcctttctgggagaggaagtctttttctttgtcctgtggctcagagcaagtctctcagagtggaggtttcaaggaggcagatctctgttagggaagggcgagttgcctggccctagacctgcttgaagtgggaagaatgtagatttggcagtcaggcctgctagtctagggccttgttcctcagacggtggttagaggatcagcagcacaggttccacccaaacctcctgggcatgaatctagatgcgtccggatgtgcacacagaagactgaggagtgctattctagaacagagcttctcaagccaggagccattctccccaatccatggctgagaagcctaaggctagaaacatgggccttgagcactggatctcaaagctctagtttcctctctggaccagtagcatcagcctcacctgggagcttgttggaaatggaaattcagaggcccaacccccaagtcagggactcccctctgggggtggggcccagggctctattttaactggccttccagtggctctgaggcaccagtgagatcgataaccaagagccagagcacctgcacgttggaaactcctggggagataaagcaaatgcttggaacaaatccgaatagcctctgggtatggcagggactctgggaacttcagatgctccccgggtgatcctaatgtgcagccaatattgcgaaccagcattttaggcctgtgaactaaatctcagcgttctcagctatcagttgggtagactaacctctgtttgcctgccagtgatgggaaggtgccttggggagcattaagacttagctccctgggttctggaaggcacaccagaaagtgggcttccatctgtccagaaaggtgcagccaagattcccgttttggaggaggcaggattggatgcccgccatggcctcaggtggaattgcaatgtggtggctgtttggtccaagtactaagtgctgtaaagacgataacctgctctggaaaaggaaatcgctagtgccttgagagaacagttcatgcattctcctcctcttgtgcttcccagcctctgccaccactgcttaattctggggcttacctttagtgaggtcatttgccctgtattcagggagctgatgctgtcagcactgtcctagcattggaacggtggggctgttggggagctggccggctcgttctgggcactggtggaggcaagaatgaggtttagagaaatatttacccaaagtaatccctttgctatgccactgcccatctcccaggaggctgggcaacaaacacagggttctggtcatcatttattgaggggacaagctttgcctcccaagggctaggaggaggcaggaacaaagggtggtggtacgatctgtggtcccagcccctgcagtggtcaggccctggggcctcctgaaagccatcagctcccactccaagcaggctgcatgtgcaaaatgaatactggattcaaaagcatcatgaagcaccagacatggaaagcattcatagtcttgtcttagaggcaaaattatatggcacttacagtgtgttgggtgcaccattcaaagtatgacctcatgtgatcctcacgaccattctatgagctaggagtcgtcatttctccaattttatgtgagcagttgctcttcagaggtctgtgatggtcagcctctgcatttcagaaataaggaactaaaggctcagagattagataaatgccctagtggtcataatgagtgagtggcagagaccttagaagtcaggtcccagtggctaaagtacatcctgaaaaagagagaatttaacgagacttctttttgattttcagtctgggatgattttaatacagaatgcctggattcagtaacaccagaaaaaacaatccacaggatgtttgtgttaaaaagattcagaggcagtcatctagcacagtaaatcctaaattttttagaccacatcccacagttaaagcacacattgtgtgtgcaaagcatacattgtgtatatacatgtgtattatatctatgtgttatatatacatgtggatacattctgctagattttatatatatatatatatacacacgcatagatattaatatatatatcttatagaaagaaaagttcctgaaacaatggctgtccttaccacatgagatgcagcttgacataatcttttcattataaagaatgttacaaaggataggtctgggtacagtggctcatgcctgtaatcccagcacttttggaggccaagatgggtggatcgcttcaggccaggagttcgagaccagcctggccaacatggtgaaaccctgtctctactaaaaatacaaaaattagcctggcattggcacacgcatgtagtcctaactactcgggaggctgacgtgggagaatcacttgagcctgggaggcggaagttgcagtgagctgagattgtgtcactgcactccagcctgggtgacagagtgagaccctgtctcagaaaaaaaaaaaaaaaaagagtattataaaggatataaatgaacaggcaggtggacaggtatacagggtgagtctggaagggtcctgagtacagaagcttctgtccctgttgagcgaggtacagacctattctattctattctattctattctattctattctattctattctattctattctattctattctattctattctattctattccattccattccattccattccattccattccattttcttaaaaaataattgcttataacctgttacatagatttcctggtcaaccagggggttgaggcctgccatctgaaattgctgttgtagtccagctctcctgctgtagaggaggatgctgaggttttgcctcatattatgcttctcttagtcacaaatctgaggccaaatgcaactgtactgagggccacccctgcccagcctgcccctgctgttacacctgaggctttgttaagagtcttcctgggtcatgtctgacctatcctgtggttttatgcctacacatccccaccgcccatgcacacactacacatcatggctcccggggaggcccactgggctctctctggccatcaactgtttcatgctcctctcctcttctgatcactgttcttttctgccccttctgagaatcagagtgaagattttgagacttagtgggaaggacttttaagctgatggatttaaatataagatattttgagagatgacttatgtatccagttctacaccagctcattcccaacctgaagtcccccaaactctgaaaagtgagtgtttttacctaattcatggaggggctggtggtgagtggaagctgccctgaactgcgaggcagtttatggtcttcattcatccagcttagtctgaattgtcgtgtgtcattgaagaaatgttagtgtgtgtgactgtgatgtgcagcccaaacctcagagattcaccttaataatttcctaaaacccgaaacaattggaattctaaaacacatctggttttgaagattttgagtgaggaatcatagagctggagatatatttgcagtgtgtgcatgttattgatttttttttttttttgagacaagatctcactctgttgcccaggctggagcacagtggcatgatcatggctcactgcagccttgacctctcgagctcaagcgattatcctgcctcagcctcctgagtagctgggactataggcacatgccaccatgcccagctaatttatatatatatatatatatatatatatatatatatggattttttttttttttggagcgacagagttttgccatgttgcccaggctgcctcgaacttctgggctcaagtgatccagacatatcagcctcccaaacgtattattgattaatcaatgaatttttttttgataagaagtagtgacagatgtgagaaagtacagtagactggttatcagaaggttggccattactggttataaaatgcacttttgagggcttttgtgaggacgaactgagtgatggctatgaagccttctggaaactacctggataagttgttgtgtgtggtctggtttctttttaaaattctgaattgtagtttctaatcctacactcattttcaacttttggcccacatcatgtgtgtatagggtaaaatatacctcttatgttgacatcctgtgacgaagaatgacccagaaagatacggagacagagagaaatgtctctacagtctttgtagattctttccccatccactctgctctgttctaatatttcccactttgttctaccttcttacagcatttcagatgctcctcaattggaactgctgactacacaggcgtgtgcgttttttcctcccttccattagccttataggtcattaaaaccttgttgctgctgctttccttttcctataaatacatctacatttcaaagttttgaaagcttattccttagaaggccctgggaactctgggctccaaagaccaaagaaaggtgtatctagctttaaattaggtacgggaaaaagcacagatctaggctctaagaaagacttcgctgtgtttacaataaatcagattgagggcgtgtcaggctttaagccaggattgaaagcatggcctttagaatacccagggagccagacctgggacccttgccaggtggggagttggaaatgagatttctgtctgaagctttcccctacaggagaaatatatccctaggggacagacaggtggtccagcagacatctgcaggggggcaaagggagaagacaggggcccttatctgttttggctttggcttgccaaaggatggaacaatgtttgctgtgagaatttgtaatcataagtctgccttcatgcaagtttggggtttgaatttgtactgcctgggtgacccaggagactccacgctgcaaaattaactggaggtagtttggggttggtcacaccagagttcctgtcagaatcaaatgcacattctctctggagggacatacttgtagctcaagccttgatggattcctgtaggtaaaacccagccattcaagcatgagctttcactctcaaaatccaaaacagatgaggaaaccagtcaccacgagtgaaagtcagcagaaacaacagacagaagaatcagattcccgagggtttcagatatagttccaatggaataggtaatgtattttaaatgtttgaaacaaatgaggaagaaacaatagactaatttttaaaatccgtggagatttgaagaatacaaataggacttccagaaataaaaaatagaataactgaaactgaagatcttcagcaattggcacacatttgtgtaagttatttttatgagcaacattaagatagcaattctcataaagatatatcaaagaaagtatttttttttttttgagacagagtctggctctgttgcccaggttctagtgcagtggcgcaatcctgtctcactgcagcctccacctcccaggctcgagtgatcctcctgcctcagcttccagagtagctggtaccataggcatgtgccaccacacctggctaatttttttttttcccattcaaaagtaatttcttttttttattattattatactttaagttttagggtacatgtgcacaatgttcaggttagttacatatgtatacatgtgccatgctggtgcgctgcacccactaactcgtcatctagcattaggtatatctcccaatgctatccctcccccctccccctaccccacaacagtccccagagtgtgatgttccccttcctgtgtccatgtgttctcattgttcaattcccacctgtgagtgagaatatgcggtgtttggttttttgttcttgagatagtttactgagaatgatgatttccaatttcatccatgtccctacaaaggacatgaactcatgattttttatggctgcgtagtattccatggtgtatatgtgccacattttcttaatccagtctatcattgttggacatttgggttggttccaagtctttgctattgtgaataatgccgcaataaacatacgtgtgcatgtgtctttatagcagcatgatttatagtcctttgggtatatacccagtaatgggatggctgggtcaaatggtatttctagttctagatccctgaggaatcgccacactgacttccgcaatggttgaactagtttacagtcccaccaacagtgtaaaagtgttcctatttctccacatcctctccagcacctgttgtttcctgactttttaatgattgccattcgaactggtgtgagatggtatctcattgtggttttgatttgcatttctctgatggccagtgatggtgagcattttttcgtgtgttttttggctgcataaatgtcttcttttgagaagtgtctgttcatgtcctttgcccactttttgatggggttgtttgtttttttcttgtaaatttgtttgagttcattgtagactctggatattagccctttgtcagatgagtaggttgtgaaaattttctcccattttgtaggttgcctgttcactctgatggtaatttcttttgctgtgcagaagctcttgagtttaattagatcccatctgtcaattttgacttttgttgctattgcttttggtgttttagacatgaagtccttgcccatgcctatgtcctgaatggtaatgcctaggttttcttctacagtttttatggttttaggtctaacatttaagtctttaatccatcttgaattgatttttgtataaggtgtaaggaagggatccagtttcagctttctacatatggctagccagttttcccagcaccatttattaaatagggaatcgtttccccattgcttgtttttgtcaggtttgtcaaagatcagatagttgtagatatgcagcgttatttctgagggctctgttctgttccattgatctatatctctgttttggtaacagtaccatgctgttttggttactgtagccttgtagtatagtttgaagtcaggtagtgtgatgcctccagctttgttcttttggcttaggattgacttggcaatgcgggctcttttttggttccatatgaactttaaagtagttttttccaattctgtgaagaaagtcattggtagcttgatggggatggcattgaatctgtaaattaccttgggcagtatggccattttcacgatattgattcttcctacccatgagcatggaatgttcttccatttgtttgtatcctcttttatttccttgagcagtggtttgtagttctccttgaagaggtccttcacatcccttgtaagttggattcctaggtattttattctctttgaagcaattgtgaatgggagttcactcatgatttggctctctgtttgtctgttgttggtgtatgagaatgcttgtgatttttgtacattgattttgtatcctgagactttgctgaacttgcttatcagcttaaggagattttgggctgagacaatggggttttctagatatacaatcatgtcatctgcaaacagggacaatttgacttcctctttttctaattgaataccctttatttccttctcctgcctaattgccctggccagaacttccaacactatgttgaataggagtggtgagagagggcatccctgtcttgtgccagttttcaaagggaatgcttccagtttttgcccattcagtatgatattggctgtgggtttgtcatagatagctcttattattttgagatacgtcccatcagtacctaatttattgagagtttttagcatgaagggttgttgaattttgtcaaaggccttttctgcatctattgagataatcatgtggtttttgtctttggttctgtttatatgctggattacatttattgatttgcatatgtggaaccagccttgcatcccagggatgaagccgacttgatcatggtggataagctttttgatgtgctgctggattcggtttgccagtattttattgaggatttttgcatcaatgttcatcaaggatattggtctaaaattctctctttttgttgtgtctctgccaggctttggtatcaggatgatgctggcctcataaaatgagttagggaggattccctctttttctattgattggaatagtttcagaaggaatggtaccagttcctccttgtacctctggtagaattcggctgtgaatgcatctggtcttggactctttttcattggtaagctattgattattgccacaatttcagctcctgttattggtctattcagagattcaacttcttcctggtttagtcttgggagagtgtatgtgtcgaggaatttatccatttcttctagattttctagtttatttgcgtagagcacacctggctaatttttgtactttttgtagagacagggtttcaccatgttggccaggctagtgttggactcctgagctcaagcagtccacttgccttggcctcccaaagtgctgggattataggtgtgagccatagcacctggcccaagacagtttttttaaaaaaaataatttacagttttacagattaaatgtgtcataatgcattggaaagggtgccctagctcagacctgagtgtttcacttaatggctgtgtcaccttgggttacactgcagccccttggatcctcttgtgtaatttgactgcatggttttgctcccaaggttcaattagatagtttttgaaaggatctggatttccctttagcctttactttccttggttctggatactaaatagtttctcccttaggaagggtccatagtttctcgtttaattaaatcagctcctgagatgaacaaagggactgtgttcataactgccggtagttcctccaggggctaggatttgctcaagagttacacacgcttatctggaagcccatggaggaggctggcggctaaaaggtaggctgccagccagaaggtcagtcttggactgcgaggctctggccgtgcctctccaccggggtggtgatggatggcggggttctgattttaagaggggcctgaatgtggttaacatggtgacagatatggatcttggttgggcacagcctgcaaattccaattaatctaatcccccgccttgggaaatctgaacattgcgttgagcttgaactctactgtagggctcagggcccaatctgttacatcgctctgcaggcatcccgtgctctgtctccttggtcagctcttctagaggacggtatctgccagggctcccccagggcctgagctccctgagcaagggagaggaggagagaggaactgggaaggtcttgagtagggaggttcaaggtaaaactagccacaggacaaaaacttcttccctccttttctccctccttccttcccttcccctctctctcttttcctcttttcatttccttcccaccttttccttcttttgctttttctccgtttctctctttcccttttttacttcccttattgtctctctgtagccgaagaatgcaagaccattttgttttcatgccacgaagtgagtacatgaacatttggaaagtaggtctcacctgggcttgcctccacccggaacaactctggacacatagtaagttttcagaagcagtcagatggaatcatcctggacattggtgcagcttctgaacctttcctggtgtgagtccaagttatggcaatggaattctacccaggaagggaagcagcaaacctgagtagtgcccacctttgcgggggaaatggcaggttcctccctctccagtgatgggggctcagcctgcagggaacctttcttcccagccagccttggaactcagtgctgtcaggcttgctgatgacatcactggccttccgtgggacagctgcagccagcatcaggacactccagaaatgccagcagtaattggaaacttcatgttcagatgctttccacagcattcacgcatggcgagaagtgcttctgccgagggacttttcaggtggtgccccgagcaggatccctgggagaccagggagatcagaagccaacttccatgtttcctggaccaaggatcctgggggatgggatggggggacattccccagagggctgcagctttctgtcaatgggatttcatttgggttggtctccagagagcccacagggtaaatttctaggcattaatttccaaagcctatttttgctattccacttaaagaatatttccatctttccttgcctatcactgctgcctgatcttgtttgtgcagtaggtgaatagaagagaaataagaggagagaaaaacatgaagattttaggggagagaatattccgtggaggcacagcaactgcctttgcatttctgatggtctgtaaagcgaggaggcactggcttgttctgtgtgtccctggtgagagcgttagggctgtggggaggtgcattcatgtggggatctcagggggatggggtgggaggctcacatttgacacctcctgtgggatagctgcagtgctagggtttgcgtctccagatgttagaggcagtaactgctagcctggtgcccatcacagataccagttactaaccacttatcttgtgccaagtactaagcactgcaccagatcaactcatttccttcttacaactaccctcttgggtgggaactatctctgacatcattttacaggtggaagagagtgactgggaagagcacagctgcttaaggtcacacagtgcgttggtggcagggcctgccctggaaccgaggctgcccatcaccaggctcctgtccccagctcttcagcaccaggatctgtttctcaatcatgtctgagctgtgtgttgaatgcactggtcctgtcttccacatttttttcctctaccttctttttatcatcatcttaactgtcatattaacatactaccttataaaagtgttgaaaagatagcaatttgggaaaatgtgctcagaagtaaaagctctctccctgtttccccgcccgctgctgcatcactgtgcttcctttaagggagtgcttaccatccgcgttgtcctctaaaacgggaatgggagggaatccctggaatccctggaatccctgagcctggagggattcacaaggggaaggtaaccacttgcaggaggccagtgctgggtgcaaggcaggaggactaggggacacttaaggtccagcctaaagaggacagtcactgagagtggcccttgatggggcttccactgggacagagatgggtgctcccagagggcgatttggccgagaggcagtggcttcccttctcaccgtctgcctgactcattgcccttgcctcctggccactctgccagctttccttcaccccctgctgcatatcctgcatgcagctgcccaattaagctccccaaatactgatttcatgatgtcactgactcctctgaactccttttacctccctttgtgatcagaagcctgaacttctgaactcctctactcctaagccaaagagtccgccctctgaccccagcttgtcttccctctgctatctgggagtctctcctcttttccacttagttgagttcctggttagttcaaggctccattcattctttctttcacctagatgccaggaggaagctgcgaaggctgagacataaagacatgtcacctgccctcaaagagcgcttggtcttgggaaggggcatgcatgaaatcaccttttttacatttaaatttaaatttatttttgagacagagtcttgctctgttgcccaggctggagtacagtggtgtgatcttggttcacttcaatctttgcctcccaggttcaagtgattcttctgtctcagcctccagagtagttgggattacaggcatgtgccacctgtaaaaaaaatacctggctaatttttgtatttttagtagagatggggtttcaccatattgcccaggctggtcttgaactcctgacctcaagtgatctgtccgcctcggcctcccaaagtgctcgtgttacaggcatgagccaccatgcctggccatgaaatcacctttgatcagcgtggtgagagccacttcaggctgcatacaaagccttcctcttgcaggaagcctttattgattgcactgtcactgtgaattcactcttctctggaggctggtgaatcctcatctctgttcttctctttttgttccttgttttctgcccggtataattcactttcttttattgccaatatctcttggactttagccccaaggaacataccacactgcctggcactgtgccatgtgcctaataataaggaggtacatttatattgagctctgattctgaagcctgttcacatctgtgattccccttactttgcataacagctctctgggacaggtgggacaaatgtgataagccccagtctgcagagcaagagacgacttgcttatgggcacacagttcataagtggcagagccgggaccagggactggagtcttgccgtgggtgtgctacgcggccccacagaaggatggatgcatggagtcccattttgtggactcccccctgggcctgcaatgtgtagggatgtgttaggggaggatgagagggcaagagggggatctgtggctagaattccggaggttcgttggaaccagggaggtacatggggtgacttgaaccccaaatcttttcatctaggcatgacactccctttttcctctatggagactgggaatagcaggatggagggagggtagaaggagtagaggagtcagtgttggggctagggctgggagggacggggtagaagagagcaagttctggggacagagggcagtcaggagacctgtcagttctctctgggtagcctggactctcgagaggactgaaatgcatcaaaggatgggtaatgaaaaaatggtgatgaggacgggttgccttatcacccagaagggaggaaaagcttcaggcccaaccatcctgcttaaacatttgagaattctatgcggttcttttaagtatttagaggtactggggacaatgtgtccagaaagtggaatcccagctccttctcaccccggctattgatttttggccttgcaattactgcagaggtgctgcctctgtgaacactattagtgctagttggaaagcttgagcttttgaagcttagctgtttgagctacctacgggtttggaaaaaaaaagaatcttaccatgtgtttctttagcctgggcatgaatcaaaaatagttgaacttttttttttttgctcaagtctcaagtttaaaaataaaaaagtcacctttgggctgagatcaagaatggaaaatttcagggcatagcgtaattttttccccatctgttctgggcaagggatgataaagcattctgttggaagattgtgtgtaagcatcaaccatgagtctcactactttattgcgttgcaatgtctactttgttaagatgtcttgaaagaaagacttcttccatcctcctggcacaactgaatgtgcttggtatggggagacgtgtctaactgaatctaagcaactaattggaataggcaaaggaggaagtgatgaaagtgaagctgcagtttctgcaaaggtggctttattgtataaggtgcaggttattaccccaaatgatcaattactaaagttctggattgggcagtgacaagtgtctagagggaatgctgggcctagggaattgcattgtcatgtgagaataaggctggggccacctttacattttcattaaaaaaagatctggacagtacttgactgtggtagtagactttgtaaaggttattatggttacagctttgtttgcttgagatcctctatttttatagttcaatattattaaggtatgaagaaactgttttatggatgtcagttttactgtttctgacaacagcttgcgaggaagtatacatttgtgcaacagaccgctttggatgttaattctaaatttagaagccgccttcaatgggtgtggaaatcagttacacaaaattcaggtgcttactaaaaaaaatctgaatatccatgaagcttgtatggtccctggtggaactttgagcagctgagcctctctgaagatcctgaggttgtcagggtgtggcacagcagctgggggctgggccccgtgcatgcacatcagcatctgtgtattgaatataatcagcacagatagggaagaaacaaaccaccaccaccaaacaccctaagtaccaatctgggcatctgggcaccctggattttcattttgactctgtcatttactagttctctgaccttgggcaccatgctttgcatagcagccttggtttcctcattggtaaaatgaggctgttgaattctatatggctcaagagttctttccagccccgaaacatgcaaaaattcagtttcgactaagagctttagcactgtcttatcttggctgtttgcagtggccaaaattgataacatattggaaaacttccctgctgattaaaatagacattgccctaagtgctgtgagtgtccctgttaccttatcccttctctgaaaccctctgggtttccccttgaagcagcccctaaaatggctcagtttccagcatagcaggaggtctccagcctagccaatggtgccccttgtgaaggtcatggacctgccttacccattgttaaatgttttccatccctctggtgtacgtggagagcttctgggtggagtggacacaaatgatttaactttcccgagtctctgcttctgcgccagaaagtggaaggaatcataaccagtgtagtggaggtaattaggagggtccaaagcttggaccatctgggttcaaaccctggccccaccacttagtatctatgtgagtgtgggcatgtcaggtagcctttcttacctcaattcataatccgcaaagtggggatgagaatagcaccaactgtatcaagctgatgatgagatcaaataacacacaaaattcttagaatagaataagcactgtagaagtgatagctctgtgtatgtcattaatacattcactggtatcactgaactttattttatatcaagtgagataactactataccatccagggagataatgtgtgtgaagcccatagcacaatgcttgacaaatagttttcagggaatgttagcttctatctaagcaggtcccattggaaaaaaaaaaagttgtatttttatatagttctagttagtttctcatctgtgatctatgctatttttaattgaaaaaaaaaagtgtttccatacattgtcaggaggagccgttcccctgtcccagcctctcacaaagcacaccctcactccctcatttttccagtagtcccagggctagaccacctgtagagacaggaagcctgcctaaagagcagaagcatctgctcagaaagatctagttgtttgctggagcctcagcttgaagaaggctccaagtttattataaagtcccagccacacagtttgcttgagactttataaagagagaatgagatgtagaggctgggcccaaacccactaccaggctgtgggaatgggggatggggtgcttggctggcatctcttctcagggcctcctggtcagcctcaggagatctagtgctaagggttactctgctggggaaaatctcaatggcactagagaccacttgagcacagctcttaggaactgaggagccagctacttagcatcccagaatcccaatgcccatggccagagccagagctgcttagaagaaaagcaaagtccgcaggctgcatggactgagaaccacctcacctggctgcacattctctgagtggccttgaccatgctgttctctgagcctcagtttcctcatcaatgatagagtggagttagctagatcaggggctttcaaaagctttttcccctgaaacccagaataagaaataccttttctttctcaacccaatacttatgttcatgtatgtaattaaacaaaagttccatgcagcaacccttttaatatgcagtactctgttttctgtgctgttgtttcagttgaaaaatgctgattgtgaatgattcagttgattctgtgacctgctgatgggtcataacctgcagggtttttgttttattttgttttgtttttgttgacagagtctcgcactgtcacccaggctggagtgcagtagcgcgatcttggctcactgcagcctccacctccagggttcaagtaattctcctgcctcagcctcctgagtagctgagattacaggcacccgccaccacgcctggctgattttttttttttgtatttttagtagagacagggtttcaccatgttggtcaggctgatcttaaactcctgacctcgtgatccacctgcttcagcctcccaaagtgctgggattataggtgtgagccaccatgcctggccataacctgcagttttaaacatatcgggctgaatatagttgagggtgcttaaatgctatgatgctgtgattcagctgggccaggaatatagagaacagtggcaccctactctgtgttgggccagagattgctgaaatgtctagcatattagatcaaccagatttttagttctaaaggtgaaaccagaagcatttttttttcctctcaaaaacacacatagactcagaggtatggatacaatacctgaagggctatagttctttttccaggattgtccctctcagcaggaatggaggatccctagctagagaggagagctgggggtgacaccttcttgcccagtggaggacagctggtggtgtggcctcaacaggttcttaggaaggtgagttccttagcctttctactagtgaggtgtttgggttaaggtgcagcaccattgactgggcccgtgtggggaggatattcaaagcatttcacaattacacagctgcctgggcaccgacagagtcctagagaagtgtcgactgtgccaggtccaacccttcagtcgctggatcatggggaggcatggagtcccattgtagaggctgggtggtggtagtaggcatgcaggaattcagggaagctgctacttaccaccatgtaaaaaggatttcaatattttcaccctggtagggatgcaccagtgtgtgcttctcagcctcagtcctggacgtatgccccattgccctaaggttgtcccaaagaggccaccattagacctcaccttttatggacaggtgggagatgtctgaacacaaccacatgttgcccagtgacaggggctgggctgaccaggacacggagagtgacttgccttctggggctgagccagtcactcatactcccagcgtagccctggagcttcactgcaactgctatgttacaggaagttgtaccagcagctctacactaaggtgtatagtcggtgaccactttaaagaaagactcattagaaagaggcattgtttggggaggccaacaggccagctgttggggaccatgccagaggtactgtgtcaaggtacctggcttgatgcttacttcccattgtctgtttcttgagtttattttgcgccatctgccttcttccacctgatttggaattccaggactgctgtgtaggcttctcttcagatgagatgcagcagtgttctcaactggcaggggcagctttcttgggggcagggactgggcatctgtgttatctatcctgggcccatctgtttctttccccttgacacccaccacaggggtctgtgtacaagagggttggttgataccagttttaatgagggaacctatcttcttggaaccatccagaagctgtggtctttttccctggaacaccccacccccgacatcccagtgctggattcaagctggtgaaccacaggtcaaaattttcagttgctgtcttccagggccttggttgttccattgtcccctctccctgtaccaggatcatcgtgatccaatggatttgatggagttgctacacccagcttggcgtgcagaggtgtttggcacatccctgcctgtggaattctacgctctaagggagatgctgccagggtattacctgattcacgaggcatgtcctaccatctgtgttatattttttttaagatcagaattatgaatatttcaggagtcatctgggatctgaagaagcaagaacccactttctgagtcttttccttaaccattcatagggggtaagaaatgtcacaggtttgttgtgaaggtcaaatgaaagagaacttgagaaaatttgcaaatccttcagttcaaggtgaaagaaggtaatttattattaattcatattgttattatgtagcatttcttagaatatgtataccaaatgccttttttgactggtgcaatctttctataattccattctgggatgttagcttatttgcttagagaatggtgtaaagaggggagcccgaggccggcagatcacctgaggtcaggagttcaagactagcctggctaacatggtgaaaccctgtctctactaaaaatacaaaaattagccaggtatggtggcgggcacctgtaatcctggctactagggaggctgaggcagaattgcttgaacccaggaggcggaggttgcattgagctgagatcatgccattgcattccactctagcctgggtgacaagaacgaaattccatgcaaaaaaaaaaaaaaaaaaaatcacttcctgggcagtctgaatttcttaacctgccccagagagcttaaaaactttagaaaatgtggaggatccactttttaaaaaaatatatatatcctctgttcatttctggaagccctaaggaggatgagagttacattctctgtcactgcccaagattctctcatgaactgtataaacagtgttgaactacatgcttgtctcataaacccagttgggcaaatattataggcctatttctgtcacctctggctggtggagtgtttgtatttgtccacacatcctttatgcccagggcacgccctggataggagaagcttgtgccctcccagatggaaaatgcccataactcatcagcccaacattggactgctaattgtaggcctggattcatagtgttcttgaaagcttcagggtgagattaaactgccttttgacagtgattgacagctttcaagattgaaataatgagcctggagcccccattccctgcaaaccactctggagttaatttccttgcattcttcctaccttccagaaacctgactcctgtgcagctctgtgttcaatggatgtcacatctatcttttgctcttttgccaaaattaattgccagcattatccaagggagtctcaaaccaatcaggtcttgcagctagaggatcatcaatataatacatgctctattgcctcagtgactttcagtctctgccctggcaggggtcctaggagattggtttgaggcattgcagtttgattgtgcttgtgattgatgggccggaggctggagctgaggaaatgccccaaggattacattttcttagggtgtttttgactcacaggtgtgcaccaccatggaatgactattgtgtgcggagggaagatggttccctggagttgggcatcaggcacttggttgggatgctcatgacccagggatccacgctcatcttgatcctcagttctgggtgtgtctgggccatatttccagagtcctggcttccaccagatgcagcataatcacggttttgaaagcataaagagtccttattgtactgtatcctggtcttcatcatcatcacttccatagactgcactttacagggcatagaattcccttttttttttttttttttttttttgagatagtcccactctgttgtccaggctggagtgcagtggtgtgatctcggcttaccacaacctctgcctaccaggctcaagcaattctcctgcctcagcctcccgagtaactaggattacaggcacatgctactatgcctggctagtttttgtattttcagcagagatggggtttcaccatgttggccaggctggtctcgaactcctaaactcaaatgatccacctgcctcggcctcccaaagtgctgggattacagcatgagccaccgcgcctgaccctgaattgacttttaattcctcgcaattactttgagaactataataccatttttaaaggtgaagacacaggctcagagagattgggtaatttgcccatggttcctctgatggtaactggcagaaaggggaactgaccggaaatccaagcccaagctatttctctctgtccacaccatatgtcagctgtgtcgattcttatgccatcctctttgaaaagaactcagagtgcttttgaaaacccacattttgcaattgctgctttatagagtgtcaatgtttgtctaagttaattctcaggtagtgacgatcaaagatgtaacagttcatccagggtttacctagttaattccagcacagaaccagaaacaagatttctggcctctctagcactaacctctccagatgccttccatgaggcatatgtgtgtgctagaggcatggaggagctaagtttgggtctctgtactgttcccttctcatctgtttaacctccaaagtattgtaccatgttctctgtgtccagtggaaaatgatgtttttacattgcatcatctgtcattcttaaccccagagtggggctggagtgttggaacacttcagcacaggactctgtttaaagctgtgagaagctctttttgtttttctaagtcggctgaactagtaaaacagttttacaactgtgttttcaagttctgttcagaaagacaagcttgaaaaaataggtgatgctgaagtgtcattttagtaaattttttttccctgttagaagagaggttggctcttccttgattctaatctttaggttatttctccaagagctacctttctgttttttttctttctgccccatgaggtcttcagtcctggatactctcatcctataatagccagaaatgacccttgatccatggagtttgacttgggctgaaatcaagtttcaagaaataccacagggccttgtgactttgtcacatgtcaccctggcctgtgagggggccgtctgactcccgccctgaagtgtatcagtcacatgcccttgtttgtctgccccctccccagctccccagcccacctccctatgtcagtgtcctctttcttaaatctgcactggactggggaagttcttcatctgatgcgttttcctgtggtgtgcgtgcgtgtgtgtatgtggtaagagtgaagagatgatcaaggaagattgaggcagctcgaatttcattatgaacggttcttctgagaagagaagtcactttcatattatgagaaaagttaggaagaggtcaatgccaacctgcacccctctgtgattggctatccccttcacctgccttgtgtaatgttgccccctttccctaagacccccaggagggcctagtttgagaaaatgggccgtaatggttgactgtgcccgagagatcaggctcttccatgtgcggaggagtctttggagatggcaccgtttccaggaacaggaaggccttggaaagtttgtgggctccttgggcagaggcaaagtttcttttggactcttccttagtcttcctcatttccaaatttcaaaagtgttttctctttctctttctttcttttcttttctttctttctttttttttttttttttttttgagatggagtattactcttgtcacccagactggagtgcagtggtgcaatctcggctcactgcaacctctgcgtcccaggttcaagtgattctcctgccttagcctcctgagtagctgggattataggtgcacactagcacgctcagctaatttttgtattttagtagagaggaggttttaccatgttggccaggctggtcttaaaactcctgacctcaagtgagctgcctgccttgttctcccaaagtgctgggattataggtgtgagccaccacacccagcccaaaagtaatttctttggactcttccttacctcatcagagaggagctgctactttgttgccacagactgtcctcagagagcctttgatcctgtctctgctgttccctgtgctgcaacctgggctttcagcaggcgaaagacacagcagacctgcccatagctgtgggcagtccggcttggcttgttaccaagagatttactcagcttgctttgaagagcttgtgtcgcccagtgaggaaccctgtgggcttctccttccactctgtgttgccagtggcctacatctgagctgcccatcgtagccacagtatcatctgttggaaccttaaaaaaaaaaaaagtcgatccctgctcaagacctacaaaactggaatatccaggagtggaatatcaaatctgtgttattgaacccagatccacagggagttctgatgctcttctaggttttagaaccatgtctgtttactcatttactagccaatggggaagctgggaggaggggcaagatgacacttgggtggggccttctgtccttttggttaccttgagcatagctcctggccttcctggtgaaacagcctgctgctgaccttgaacctggggtgggttcagcaggaccctctagtccctgatggggcatcccctgggagtaggcttgaagtagaagcagctttctgggtgtgggatgcccctgagacatagcaggtgggctcactgctgagtaactagaggtgcccaggccctgactgggtgtgcattatggaggaacagcttggtgcactgcctgcagggttgcctggtgactgcccagcaggagggaggcgagggcacttcttgggctggtgctcactgctgacccagtggagggaacattcatctcactagaggagtgtcaacggcgcctggttcctgccttctcagctcccaagtgcccctttccttgctgcagcaggagaggagacttggccaatgggggaagagtcatttatccatgagctccaattcaggaacatttgaaatattgacaggctgccttttaaaacatttacaacaaaaatagttttatggagtcccacgggggaaaaaaaagaagaaaaagttatatttctgatttcactcaataaaggaatgatactgagaatatcagctttgttatttcatcactaaaatgttaatgtctgtgctgtttgggaagttgcaatgcagaggcagctttctccccgcctccccaccccgccacccggcgtttttttgttttgttttgttttttgtttttttgagacagggtcttgctctggggtacagtggtgcaatctcagctcactgcaacctccacctcctgggttcaagcgattctcatgccccagcctccccagtagctgggactacaggtgtgcaccaccatgcctggctaatttttgtatttttagtggagacagggtttcaccatgttggccaggctggtcttcaactcctggcctcaagtgatcggcctgcctcagcctcccaaagtgctgagattacaggcgtgagccactgcgcctggctaacctttttggattcttaaatgtgttcatgggctgcatcaggaagccaggccaccgctggtccctaggtctggggtgttcacaagaaaagaagatcataaacatcatgtcaaaggcaggaaaaacaaaactctgccctctgtggtattaagtcccagtacttgaaattccaaatgtccaaaggggagcagagagcagcacacacatgtatcagttgcttgtccacctggtagttgagtgccttcactgggtatgtgtggtagctacagcctagacagtactgctctatgctgggcactgtgctaagtgcttgccctatattaacccttttagtcttccctacatccctgaaatgtgtttatgcacttcttgttcctgttttcatatgaggaagcagacccagaggatgaagtaatcttatcgaggtcacacagctgggaaatggagaaattaagattcaaaccagacaggcatcctccagagctaatggtttaatccaggcactgagttgccttttcccaaagtagaggataagtcagtcaggcagccacggccctcagggtacctccagcacacctcatgctgggcccctttgtagtggctgggctctccccttgaagagttttctccatctcttggtctacaatctagcttcccagccttctgcaaccaaatcctttccttactggtcagaaatgcctggaaattgcagattagttcagggagatttttcccaccatgggtcagagagatttttcccaccatggctcagagaggtctgagcctctctgtcactgacatttgacctcatcctcgtcacttctggccttccagtggggctggtctgttctaaccatctgtaagcttagaactgtacggtcccctttgtggaaatctgcttccaagagtggtccctggaaggagaaggtgacttctacatctgtcctctggttgatggcttgaatagatgtgctggccaggttggattggaaggtctcagtcttcccagcaagctccacacacaccatgcttaggggaaagaggctcttccttgatggctccaggctgcagcatcagtcgaatcctagctagaattttgaagcatcattgtgctcatcagaaatatttaattaaggctgcatattaacagtgtgtttttccaggccctaggcaggaccagtttagttggaaacggttcctggccacatggagagcagtgcctcagattggaggtggaaagagcatcaactgtggggcacagggatttgggatccagtctgtttctgctcttctttctataggtctgagttttctcatcagtaaaatgaagccattagaaagttggagcttttgagatttttgctgggtatacatttgtccagaagtatcttcccaccatggctcagggggtctgtgcctctgtctgtgacatatgatgaatttttaaaattggatacacagaattctctagggagagagaagaatgaaggtaaatgagcccttcctctgtccttcccctgtacatataagagcataatttaaagtcacccactttaagtacaatatttacttaaacttgcataggtttttcctgtcactccatgatacatgttttatttaatataaaaatagtggtagctgggtgtggtggcgtgttcctgtagttccagctactcgggaggatgaggtgggaggatcacttgagcctaggagtttgagagcaacctgggcaacatagcaagaccctgtttctacaaaaaaataaataggaatagcgttcttcccacatctctgaatcagttgaatactctatgagtgtgtcccctgagtgggctttgtatgcccctgactccaaaatcttggttggagtcttacatctgggaggtgaagcttgagggctagggcccatgtactgcttgggttgtggggggaaatgtataaaaatagccccccacctggacaacctcagagtcttattttcacactgcttctagcatctgccttcatggacctaacaattatgtcaacatcctaccttgaaaatgctccacttctgaagatgtgcttcgagggagtacacacaatccttgccactcccccaagccttgcttctgcccagacgcggcctggttccctggggagaggcatgcctgagtctgccgagacgcctgctccagaatgttttcagggcccgttccagctcttaggttctgtggatctacgtgagatcacaaagctgagacaggcacactgacaactgggtagatggcacaacagtaagttaatccaggagataaaagagaaagcgagacaggaaagaatagggtgaaatcccagagggagcgccagggcccctgggacttccagttgcttccagcggcagaaagaggacagctccagctgctacagcacctcccaggaccaaacatggggaagtctacccagcaggtgctgggagagaggcagccccaaccagagccaatatcagatgggagttcctaggggaagatgatcccactgggcttgggagtaggctgggatccctctcttctccaacccttcactctcccatccagtgcgctcctgtctcttccttctcttcttttctcctttgctctgacttggtcctggtggtgaaggaccagatgtgagcatcactgcctggcttgggagaatctcttgggtggctgggctgggggtgcgtgcacaatgctgaatcttactccatttgttttcaacttattcttgctcccttcttagcatcctgctcttctaaaaaggaaactgtgatttccctgaataaactagtgctttcattgtccagcattggcaaggaggaaaatgctctgagagggcaaaaagtagttggatgaccctgactctctccagcttcaccttcctttgggagaatttctcacgtatttagtacgaacacctacatactagttttaaggtggtgccattttcctctaactgtggtgggccaagcttgggtgcatgactttctaacctttcgctaattgtctatgttgcgttgagagtctggtgggatgtttagacaggacgttactgaaaatgtggagacagaaaaaaggaaatgaatggaggctgacagagctagataactgccctgtagggcatagctcatcttagctcacagaccctgccagagtcctcatttttttggccttcttcatgggctgggttcgctcttctcactgcagcccacaactggttatccacccttctaaaaatcccctgctaggagagttcagcccaaagaggcagataggaggatcacctcttccaaggagtttaaggcctctcttctgggtgctactttcctgttagatgctttccttttctgtgatgattgaactagggaaggagaacttcccttccccatctagggagagagacttcctctccatctgaagggtcctggccttactcctcaagataatggagaagaatttaatatagtaaattcaacatctccagccagtatgggagatatcataagggacaggacacatatttcctttttagctccagtgctccaggcctcagcttccttgtttgtggagtatgcatatttagagttcctacttcagtgttgaggactctctgtgatggtgaggttaatacatacaaggcatttagaatagttcccaatgaatgacttttatcagtgatgtgttcccagcaggtctgctcagtgtgtgagtctagtccatgaatggcccagagtgggaagatagcatcaccatccacgactcaagtgaagcacatcatgatttttcaaagtattcatctatgcatcccttattagtttccataccaaccccagagtgtaagctccacaaggcagggaatttgtccatcttgattgccactatatcccaagtgcttagcataatgtctgactcatagtagatgcccaataattacttgttgcatgactgagctctgtgagttagatggagtgggtagtattaatccatttgacagaagaagaaagtgagtcccagagacatgatatgactcttctaaggttgcatcaggagttagccacagagctggggcaagaccctgagtctcctcagtcctgatgcagtgctccatccccagtgtgctgttagatctatcaagagttgtgcctgctggtaggttggaagcagggaataaaccctgagctgccaccaggtcagcttcatggattccattgaccctgcttctctgggcctctgtgcacacctacatgtgtacatgctgggagtcagaggctgtagagactgtagactagtggcatctgctacatgaaatcctgccaagggacagctttggagaagccttctgtctgcccctgagctaagtgggggtggaacatctgaccacatgccctcttgcaccaggcgttgtccacgttaggcttccaagtgttgggcgtggttgcagggtaaggctgcatgattgcaccaggcatgttggtttggcctccctgaggtggtgcacagattgcctttctgtaaataggatgtctgtcacctgaggcatttgtaccaggcacctcattccttttttggcttcctgtggatttggaaggaaactcaggggccattttttttcatccttttccctccatataagactataccaaatatattccagagatattatttgctcttaaaaaggctcaagaaataggcctaactacatctgaaagtttttctaaatcaagggttggcaattttttttttttaatttgtaaaaggccagataatagagattttaggcttttctgggccatgctgttgcagccactcaactatgcctttgtagcatgaaatcagccacagacaccccagaacagatgagcatggctgtgtgccaataaaactttatttataaaaataggcatcgggctggattgggcccttaggctgttggtttgctgactcctgttgtaaatggttatctttgggtcagcccatctttggtcttgctagtcttgggtgctgcttgagtcagataatccaagagaaataaaattccatgttgactcctctccttagcctctgcttcaaaacctttttaagagaatatttactcaagaaagagcttggaaggtcctggaaacatgtgcctttcatgcagatgccttactgcatggagaaaagcaggctttcaccccaaatttctgttgatctggagaagccacacagaggtgggcccggttgggcagcctgtcttgggtgagtttgggttactgtaaaagctcagacacttgggttcttggctctgtatgccctccctccctgtcttcctaaagccaagaaaaatgaaaggcgagggctgtctgaactagggtgtgatatttaagtcttagtgggtaggttgaaatataacggagccgttctgttcattgagccaagcctgtggactccttaataatccatggtcgggattgcagccctgtggggaggcagtgggagccttcagcagcttgaaagtagatgtctggattccaggaggtacaagcttccaagaaggaaattttcgtagctcatctttgcacaggaaggttttaatggaaatttgaacactcctagtaaacacccttgctattagcatctttcattttgacagaggagttttcttcctctgttctgatgggttatccaggctgggctgggttcctgtgtggagttatgggctctctttagggaaacatttggtgtggtagaaagatcttggtttctggaatgagatttgtgtcttgaccatgtgccattaattgtaggtaagatcctcaggcaaagtctttgacttctctgagctttgggtctcactgttgctgggtgatggaatgagagtgggtttacaaagcaccaagcacagagcccgacacatagtaggtagcctagaagggaaaacagaactccagttgctaatgcccaggtctgccccgccatctttggggctgggttatctgtgtgctcccctgacagggagccacccaggattcactttcaaagatgggaaaggaggcctgaaggggacatgctaccacggagtgagcaggcattcctaagagtcggtctgtcctttcctctcccactggagatactcagccagtgtgggggccatgcagcaccggggaagggacacatgtctgggaatattggggataaccttgtgtgaaatttttcagaacaggccggcagtggcctgggacatggatagctcaggctgcctgctttgctcctgtgcttgtcctcgtgacttagattcttcaagatggaggggctccctggctggtcccctacacaaggcccctatatctgtgctgggtggtggttctgatccctttttccctgtgggggtggatcagagcttcctgtggcttctcggtggggctggagggccctagcacactgtgaactagtgggaggcagtgagctgggaattcagtggaggagggagagggaataggaggaggatgaggaggaagaggaggaggcagttgagacagttctctcacttatgcagaaagtgtgtgatgaaagtgtgtgatcacagccagccccacacagactttcctccaaatgagaagggagtgagaaaatgtaattttagtgtctggcttttgactgactccctgtggaggttccttctgggctgtggtgttgggtgtctctccttccctccaagggacagccaggcctgggcctggaataagtgagttcagatggtaactggggaatggccatagggagggagtgaagagccgtgcctgtgccccagggggctggggggcttggatttcaggacatcagggaggtgacatcaaggacactgcaggggggatttagggacagggtagtggggtcagtgcctgactcagtccgagctgagctatattgggtctctgttcctacgctgaggcatgctttcccaggcgtgaggccatgttttccaggccacagtccacagcctcgctgccaacacaggtgtgcattttggtggaggcttgctaccctctgtgtgaaaccaagggagcagaatatttccctgaaatcggggctcctggaacatgaccctgccaggaagctcaaagtcctgggagaatatgttccaggcagggcccggggggcacctccatgccccactgccttgtggctcctggcacaggagatgctggacagtatatactctgctggctggacaggctctcatgtctgcatgtgaaaatcaggttctggggagtttataaaccaaagaaaacccctccacccagcccacagagtgccagcgattccctcagtgattcgtgtgtggaggattcacacttggtggaaaatctacttaacatttttatcctattttccctccactcactgtcagtcctcatgtgttaggggagtggaaactcatttaaatatgagtctatgaaaaaatttaattaggaagataaattgaaaaatgcatataatacatttccgtgtcagacataaattactttatccacaccactgcacccctccagttaacccagggagttgggagttgtctgtgggatgaaaccctcttaggagattttccggaggaacccaactattaggaactccttcaaagcagaacttaaatgatagcatatagttaagtacatattagaaacttcatgattccatttaaactaatcattcagtgacttcatcgtgggtcagaaaaaatatgctctcttctcggtacattttgcacctgcagaaggatcacttggggaggaagaagatggggtagatgagggtcacatgatttttgtcttcctatgttggaagacaatgcttatggaaggggattagactttttgctgtgtccccagggagcagagtcagtgccattggttagaagttatagaaaagtggatttggggtcaatatgatgcaatactttctagcaaagaattttggttaaaaacacaggctttgtattcaaccacaatgaaaagctgaagcccagctctgcaaactactagctgggggacctcaggaaaatttacttctctgggcttcagtctcttcaacaggaagacgggcaaaactatagtgaaacctcataccttcatagagttgctctgaagatttaaagaatacgcttagctcacagttagggaaattcagtgaaaggtggatattattactagaagatagggtagcagtagaaagaaaatttgtggtcctgtaaaattgaagttgccctgcagtgggatggggcatatgaggatagtgagtgcttcatcatcactggagattttgacagcagcttggtgtgtggcttcttctcaggagtgatttttggagattcaggaatcagattcctgggctagatgccgtgctcttcaagtttagctgtgaccctctcaaccacttgggaattttttcctttaaacaattataacaattgtttttgaaaatatcaaagttcagagaagaaatttaaaaattactcaaaaatctcacttcctagacataaccatcatgaacattaagaaaactcacgtaatctctctatcatcacacacacacacacacacacacacacacacacacacacagctggaaagatatgtagatcacagattgacaggaataattttagaataatgggatcacactctacatcccaattttaacaaagagtattaacgtacatggcttaaatttctaagaggaaacaagtacatctaaaggaagttctgagttctggaaaaatatgtcttcattgaaatggatatcttttagaagagctcatcaaggttatgaaaaattttaagaagatggagtcattgctttctgttaatacctagtttcaattttagacttttgagcccatgttataaatgatgaaaaaattagcaatcacctgcttcttcctacctcctaccccctttcttattttaattatagcttatttttacattgttaaggctgataatatctaacaagtccctgagttgtttagtctcaagcatgtcccctacgtaggaattcaatttccagttgtattctttctgttctagtttactcgacaatctaaaatgggattattttggtctttgatttgttttctttgacctgctaacttttctgaattcattgaatatatgtttttgttaatttcttctatagcattaaacatttgcaggaattttctttgtttctttggttatgttttcttctagagaggttcttcatcatcataatagcacaatatgctattatgttccttattttcctcctgtagtgtgtgttcacaagtgccatattttttttatcttgcatatgtttaacttgggtagctctgtccacttcttctaatcactctgatattgagggcaaattctttaggactccttttgtgacttacctgaaacctctgccatggtgtcagctccagtttgagatgctttctgatgcctgggagcattataggggaacatgggagatgagggtggtcagactcagagctgtgtgctcctttgggtaggaccacatttaactcttgcatgactttgttaaatgtgctgttccagggctcattccactaatgaggggatataggaggggatgtccttgccatttagatgatcccctcaattaagcgttgagccctggaacctgtgtttctgtgagagaaagagagagagaatgagagagagagaaagagagagagaatgagagagagagaaagagagagagtcttgattgttcatgctgctgttttatagctctttttctaatagttctcaatctgtttccccaactctctccgtattaagtcagaaaagaggaagaaatgatgtcacactcacagtctgcttctctgcaaatatatagtaattagtgagaagtctaaagattttggcctcagcaataatacttctgaagcatggggtggggttaggaacctgacaacttctgccaaatcctgttcctgcccccaccctcaccccaggtcttttagatgttgatagtatgagtgtgtgccagttccttgtttgattgctgcttgcttttctccttcacttattggtttttgtttttttgttttgctttgtctgattatgtattgggacactctgccatctttctccaaaagcctccctgcgtatcttttaaaaaaatacaatttcctaggctcaacacagagctatagaattagattcccttaggggagggccacagaaatttatatttttataaaacttccaaggcgttctaacaatcagccaagtctgggatccattttaagtttcccctaagattctttccagtgctgagattctgtggttcattgtgttctctttaagaaacagggagggggtgttagcacagggattctgtcatattctcaggcatggcatcctctcactatgcagaagaagggcttatgtctctctttatgccaattcttccttttgtcttggtccatttgggttgatataataaaaatgccttgcactgggtgatttgcaaacagtagaaatttatttctcacaattctggaggatgggaagtccaagatcaaggtgcttgtggtttttggtaagagcccacttcctgcttcatacatggagccttctgtgtcctcacatgatggaagggaccaggcagctctctgggacctcttttatagagcagtaatcccacttataagggttaaaattgctacatataaatttttggggagggacacaaatattcaaaccattgcaaagggataaggttggaggatcttctcatttctctttgtcacaatgacctaaagataccctccatgttttagcaaacttgcccttgagttagtgaatggataagttgttctcaactctggctgcacattaaaatcactttggaagcttttaaaatattgatgcctgggcctcacccctaggcatgtggagttaattggtctagggtagggccaaatcactggccttttctttgagttccctaggtgttctatctagcgtgcttccaagactgagaaccagtagattgttctttcttatttttttagtgactcatgatccattctccattttccttactcctatctcaagccttgattttggaacatgtactttctacacactgaatagtttctaaggtaatgttacttagaacaatagagtcacgtagtttcaagaatgggctttggagtaatagaaatccaagtgtgggtcctttttctgcccctgctgcttgtgtgagcttgaacaagtaacctaacttctctatttcacagtctcatgcaaaatagggattttaattctaccttgcattgttttgaggaacaaaattagtttcatatcatattaattacatgttacactagttttcttgtgggtagagtttttctgacatattattttttgtctttttattgtcaatcttttaataaggcttttctatatgtttcttacaatcatcaaataattgaattttgtttaatgttttcatctggtttgataatctctgtcttttaataggtacgtttaattcgtttatacttaatatactcactgatacaatatgtgagttttttctgctgttttattttgggtttctttgctcctctttccccctttcctgtcttatattaaaggaattgttccatatttcttctttttttaaattttgttggttcataagctgtagatcatattctgttctcctagtgattactctttttttttttgagaggaagtcttgctctattgcccaagctggagtgcagtggtgcgatcttggctcactgcgatctctgcctcctgggttcaagcgattctcctgcctcagcctcctgagtagttgggattacaggcgtgcaccaccacactcagctattttttttgtgtatttttagtagagttggggtttcgccctgttgaccaggctggtctccaactcctgacctcaggggatcagcccacctcggcctcccgaagtgctgggattacaggcatgagccaccatgcccagccttctcctagtgattactcttaaatttttgagatacattttcataattctgggaacattgaaagtgataacagtatttttactcaaataatgtattcaaaatattcagcacaatgcctgacagtcattaaaatgcataataaattccaattgctagtgctagtcttactactgccagcactacaattaatattaccatttttacccaaagagccactaagtattatttttatccataagtatggtatcaagaagatgaacattgtgaaagttatatgaacaaattatagtctgaacagtgccagtttttcccaaaggagtttgctcatttgtaaaatgttatactgattattcaatgaggtaagttctgcagagtgcttagcccacagtaggtgctcaatcactgttagcctttatatggataccaacctggacttcccttttaaaacaccccagctttgccttattgctctgcaagccagttctaggcatgtgtctctttggctgtgaccctggatccaaagcttttggggactgagtgtggatgtgactgctctgctccacctggctgggacatagcaggacaggcagcaacccaggtctgtgaaatcaatcatgatgattctgggaggaattattggtgaattagggggatgctccaagggatggtccagatggaggtaggtgtaaagtggagttttgctggaaggagttgtttttgcacaacatattgatttccttggggtgggagaaaaaagaaacagcagctcttcgctgctctcccagagtggtgggtaggagaggacaggtgggagtctgtgggcccctttagctggttatttttttagatgtaccatcaggtagctgcaactgtattcccactgcttccccagcaatgcaaagggcagattacgaagcagagctgggctggcagcaagttttgctttgctttctcccagcggccaacagcatttgcattggtgggtggtgcacacactctgcagagagagggcgatacccaagcccagggcccacagactgagcacagaacagaaaattagggctgggaattcacccgtggctcctcagtgtctgtgttgcccatctctgatagacttccaaaatagcaggggccaggaatttggtggggacacctggggatgaggggccctgccagagctgggttcattcttgagggaatgtctcccaaatctgccatttaagaggatagagtttcggtccccaagctcaattctgcctcacctccatgctccattatctgggtatccccaggccactcacttatcccacccatgtctattctcttacctgtaaaactagaattgcaggtattttagtggatacgttgttgggagatgactcataggttttgatcccatctccatctctgcattatcttggacaagcaacctgacttaggtgcttgcttgtctttaaaatgcagaacgttagtacctatcatgctagctcattgggaagttgggaatggcaaataagagaatggccttgcaggctcttgagggaacagaaaagagaaaagtgggttcctcagagacatatgctcttacctagggtgggggagctggtttatgaatggtgtaagtctcagagtctccagcttcttccctagggtcctcccggaccaaccagcctgtattggagtgtgttcagcctcttgggtagatgtaggaccgtgggtggtgacatgaaggagacaggttactgctcagcaggaggggggacctatgtacggagcctcctagcctcagaggcagctgttactatgcagagccttcatgctgagccctgtgctaaccactccacacacactgtcccctgaatcagtcttgacaaccagcccttcacaggcagggagcaatgggattagatgccttttgtggcacgagaacaggttcatagaggccctctgttgggtcagattttaactccatatccttaggttttaaggagatccatggagtctgtggcagagggaccaaggtgggggagggggtgccattgatggatcatagatgggactcaccatctagctgggctgttgaggactccatattagcctgggagtttagtactggcattctccaagacacacgtgaagaaattgaggttcagagaggtgaccttgccaaggccacacagctagtaagctgtggagctgggattctaactcagatctggttgactcagaagtccagctgggggtaatgatggcaatgaaagctctagagttggaagagacccagacaaagcgggtttggggctgcttcagcgaccaaggatcttggggagaatcctggcccacgagaccacagtggattcacctgggtgctgctggccaagagtttgagtgtgagtgtgtatgggtatgtgtagggtgtagggtatagcacatgtatgcagtgtgagtgtagagtatgtgagtgtgacagtatatgtgtgtttgtgagtgtgtagagtatgtgaatatgagagtatgtgtgagtatgagtgtgtctagtgtatgtgtgtgtgtttagagtatgtgtagagtgtgtatgtgaatgtagagtatgtgggtgtgtgtgagtgtgtgtagagtatgtgaatgtgagagtatgtggatgtgtgtgagtgtgtgtgtagagtatgtgaatatgagagtgtgtgtgagagtacgtgtagagtatacgaatgtgagagtatgtgagtgtgtgtgtatgtgcgtgtgtatacagtgcctccccaaaggccccactccaccagcagcctgcccatccatcatcataacgggcgtggaagcccattccattcctgctgagccctgccaaaaaatcagtgagggagagccaggaagaatgtgcgccgggaggagcaggcagcgtgttgcagtccgaacggcccactgtgatgatttgggtgacgatggggccagcggtgccaccgagactctgatggctccttaggagttgttatagtcacaataatagattgttctctgtttctcaatgctaggtccattctttaaaatttttttttcttcctttagaggcagaggaggagatggagagttggtgagattaggattttaggtgtcttcaagtcaattctgaaactctaagaagaaatagagaattctgagtgattttaatttttctgcagtcatggggggaatttccatagggaagatgctttccaaggaagctcatgtgtcttggactctgaaagagcccttctcaggcctggttctggcatttgtccatggtttggggaaggtgggccctgggtgggggcaaggatgtgacttttggagcaaggtgtgggcactgtaggctcaatgtggttctgctggggtggtgttcttgtggctgaagaatgtgtcccctgagttggcacagtgatgcatgacataggatggaccaaacggaaggcatttcctgtcactgaaattaaaggagcaggggggtggaggggaagcaatggagcagaagaggagtttggttctaggagcattcagaagtcttgggagtgttgggttaggtgacacagttcctgtctgtcctggggctctatgtactccccctggagatttcactggaactggtgatgtcccgtgtttagggctatctctggaaaataaatatgaacataaaataataagaggctgaacctacgaaggaaatgaactaaagtcaatacacatttttcccagacaccatacaaggtcctgcaaatcactgggaaatgaatgggacacaagacatcacactccatgcggtgagctttgtgtttggtttttcccagtcattggctgtggtgaatcatgtgttctccctgtgttcaaatggctgttgagagaaaggtgtggatgttggcagctctggggaggagaccagtgatgacaccaattgagggtgcactatggtgtttagatcattggcttttaaaatttagtcaatgacttctgaagtgggcctttttgcttccagctgacagacatatcagagtgcgggagacagagtacccaattccaaccccaacatcctgcccacaagctgtgggaacctgagtaagttactcacctctttgtgcctctacttcctcatctctacctgggggaggcagtcaacgtacctaatgttattttcatagtaaggctgttgcacagaatagatgagttcgtaggtatgaagcccttagctttgtatctagcacattctaaatgataaaaatattggcattactgtcactaatgaggatattgaagatcagtgaagtgagggaattctcccaacactgggaagaaagaccacagcaggaagtaagctctgggaaagcccatgctgtctgattctaacaagaaggatgctggcgtcctcctgctccgagatgccaggaactgtggcctcaaacctgagggacaattctaaactccatctctagacaaagagtagttgccaaaccaaataattccgcaaaatacacatgccagtgcattttcctttctttgtcttaatttttatggatacataatagttttatgtatttatgaggcccctgtgatagtttgctgtgagcacacaatgtgtaatgatcaactctgggcacctgggataccatcacctcaaacatttatcatttctttgtattgggagcatcccacatattctcttctagctattttgaaatgtagaataaattcttgttaactacagttgccctgttgtgctactgaacactagatcgtattccttctatctacctgtatgtttgcacctatcaaccaatccctcttaatatcccctccccactacccttcccagcttctggtaactaccattctactctcttgctccatgagatagttttttagcttccacatgagtaaggacatgtcatatttgtctttctgtgcctggcttatttcacttaacataatgtcctcctgttccatccatgttactgcaaaggacagaattccattcttttgtatggctgaataacatttcattgtgtatatgtaccacattttctttatccatttgttcattgatggacactcaggttgattccgtatcttggctattgtgaagagtgctgcaataaatacaggagtgaagagatctcttctgtgtgattgcttttcttttgggtatatacccagcagtggaattgctggatcatatggtaattctatttttagttttttgaggaaccttcatactgttttccatagtggctgtaccaatttacattcccaccaacagtgtatgaatgttccctgttctccacttccttgccagcatttgttattttcagactttttgataatagctgtcttttaaaaaactgaattataactacttccatccgtatttttcggaaggaggggaataaacttcttggaccaaatctgatgagtcctgagatatgtggggtagatgaacaggagtcaatggtgggaccttttgacttttgagccctggttggagtattttgggatgttagagcgtccttctggaattaagatgtgcttagtaactgatgtgtggttgctactggagtgtgtgcatgtgtgtagaatttaagaaattataattcatgcgccaccttcatataacatattcatgtaaagattggcacttggtgaatctccacgacccttatagcatccctgtagtttgtaggtgtggttgtagatataggttgtagattatgggttataggttgtaggtatatatggtatagattgcagttgtaggttgcagggtataagttggaggtacagggtgtaggttttagtttgtagttatatgctgtaggttatagctgtaaatggtaggtatgggttgtaggctgtgggttgtaggtatagattgtaggctggaaacagaaagaacattgatcaaacgtttgtcacttctttgttttgggaacatctcaaatattttcttttagctattttgaaatgtagagtaaattattattaactgtagtcgttctgttgtgctactgaacactagatcttattccttccatctacctgtatttttgtgcctattgtatagatagacctggaccttgaacccagaacttttgatgcccaaatccctgatcttcctgagtatattaggttccttcaggaaaaatgagatgcttttcagtggtaatgtttatgcttcgctataataaatacacataaacgtggatagagaaaggacctcgtatctagtttcttcctaggacaccagttggttatcgtttgatgcattttctttaagcctgcttgtaccaattttttaaattatttcaacttctttagctctgactgtaccctctgccaattttgtatgctgccttctgcctcccagttactataacaaacatctcctatgtaaaccctttttatgactacattctacttggtatggctgcaccataatttctctagtgtaggatatttaggctgtttctgctgtttggctattataaataacatagcaataatcatctctgagctagaagttttcctaatgattttatctttaggtttctgggatgagcatagggctggatgtttgccaggctagggagaagctggggaggagcctggtaacgccctgagggggaagcctggcctggagttacctggctgcctggctcaagtgtgcccttggcaggggctgctggcctagaggccagcaccaagcagcatagtgggccagctttggcatagatggagcaagagagggaagggttctccctctgtaatcaggagtagaacattcaggcatggagctaagacaaatgagtaccttttagagctttggctctatagagacagtacaggtggccatgaggtggtaaggaacagtcacacatttatagcctccccacagttcatccttctgatatttctgccctgagttaccaatgagcaacaggcagttctctcccacaaagcctaagcagggggagttcatcctcctttgttaggatttgattttatcagagggatatttggaggtcagtggctggaagaataatgctgtcagagtttggtgactcttgccgggcagtgatggaggtgggggaggggcagagcctggcacacaaatctggggaagagtggtgggatgcgggaagaaagactggtccctgtactcaaggagattaggatccttagggcttttacttccaacatttactgttcctcctcccgggatgcctgccttcctcttgtttggcttgtgtttgcaaatgaagcagacaagttctagagaagttaaatgatttgtcctaagtcatgtaatcattgactagggaagggaaactagacccggagctccagcttcacgggtgccctttctcctgtgtcatgcagccgcttctgtgtgttggctagtctgcccagtagactctgctccttggggctctggttgtgtctgaccttgttgaatcccctgcatgtgtagtatgaccttgttggggtgtctcaacactgggcatgttagcaacactgagggatgaaagcactgtcatgccctggatggtcagccctggtttgttgaatgcacgagtgttcatatgtcagaaatacatatgcattcactctacaaatattttcaaacatttattatgttcccagcataatagtagagcttctactattgcaggggagaaagtcttcaataaaagttatagaataattaattacagatggtagaggagctaaggaagagagtgatttcaggttgccaagagaacatactcagagaggcatgatagcttttggggaccctgtcagtatcatcaggatagcccggactcagaagttagtctctcatagagccaataggaaggttttggcaaatctggattttttcacttgcattctggttttggttctgctattgactatcagggttactttgaaaaaaccatttgcttctttatgtcttgcttgctttatctgtaaaatgaagaggttgtaaaattcttctgtaaatcatttaattaccaccctcttcccccatggaaacaaacctagaaaatcctaactttgctttaaaaatattcagtacatggaatattttagtgttcatgttttctcttttgagtggggtttggccattggctggttcttggataaaatttggagggaggtattctccaggcttaaatgagtgaaaaagtctgggaaaaaataaaccaaccctacctccttcccacccaaggagtgtcctttgcatctggcatcgctgtgttttcattcgctggtcagtccctcatctgctgccaacctcttcccttcctggcttggtcagaaggtccagagagcccactgtactggcggggagaatctgtcccttttgcgcacatcattgggaactcaaagtcatctcgtgttggagtcaaatgacgtgttagcacacgcctgcttgggggatcctcctgcagttggcatattgcgtgacacacggggggattctcatcgtgctggaatgcatggccagccccttctttctccaagcacagttcagtgcattttccccccagttgctgcttctcgtaggagattatttctgattcgtattgagttgttactggaaaacacttcagagagataatgagctgggtagttttcctcttcatttttctttgttgttgttgaattcatatgggtaactgggctctccacttacactttattgattcctgaatttagggcatagctctgtaattggcaatttcctcagtgccacgtgggcagagagaagtactgtgcctggggctgctgactctgcaggaagctgtaggggcacttccttttagccctggactgacacagctgagtgcccgtgggcaagtcccttgttgcctctttcttggctctggtttttccttgctgtcttgtgaggggtcagaccagatgactttgagcaccagcccttccagttcttgaattttccaggctaggttggaagcccttttctttggtgggtttatgcatgaagggccgggtgtttctgtgttcacggatgacactgctgatcccatgtgctcttgtcattgttttccttggagggctgagggatgtgtgctgagtcacgcacatgcacagccggagtcccttgtgactaagctgtgcatttgcaggagcgctggcagggtcggtggtacagcctctgaactgggacagcttgaacccagcgttgcctggagtgggaataaaccttgaccttgctggcgtgggtgaggggcacctgcccagggagctaactggtctggactcatacagtgctctccttctgtccatttcagtatgctggctgtcagctttgtttatgcatagatgaattactctcatttcagattatcgtggaaaatcttgctgtcaagttcttaggacaggattaagtagaataggtgataaaggtcattggcattatttacaatctcttgactttcattcacccccatctgctgtagacaagctggatgcttacaagagcggcaaagacttgggacttagaatcaggcacacccaagtttgaagccccgcgtggtgctttctggctgcgtcaccttgaacgcttgcttccccaagtctcggtttttctaaaatggtaggaaacagctttgtttggcctaagaggtttgctggtggagactaagtgagctactgctgtgttttgccacacctcaatgctggtgggatgcaagatgctttgaggagggacacagacgaatttcttattatagttgtgtatttgaatacacttgtggaaaaatagaactagtacatcagagctcgtgatttcacagatattattgcccaggacaatgctaatttgaaaaaatcgagacaatttcaagttgatttcaaggataatatgcactgaatattagtgcaggcaggcaggcggggcagaaatcaggaagatgggagagaatgacagaatttggagtactactgagacctacactacaggtctcctatagaacatgtggtgggagcagaataaatgcatctttctctttgtgtctgtcctggtacaaggaatgtttggggcattggtataagaagctcccagagaaaaggtgatggtgacttagctttgtgcactgcatcaccctcacaggcaacgctgtctgctctaggcgtgacttgcactaagtgaatgtggacaagatggccactttttctagatccttctggggaagctgttagttgtaatagtgttagaacctaagagctagaagagactttggagatgatttactgcattttatgttagacttagacaatttttttacaaaagggaaaaattaaaaagccccagagagacctggacttactcaaagccacacaagtagttgagcacagtggctgagatgaatcattttgtgtctttccccaaggatctctctttccttgtccctctgtctatcctggtcaatagcatcattgtttgaagtgagtttttggaacaggacccagctgcattcggtgggttagtccagcaccacaaggatctgtcctttagcattgcctgtgtctctggccttctcgtgttagttagaagattgaggaggcaaccatgtagacactgctggaggaagaggaaacgaatttaaaagtcacaagttttggcctcagatgcctgtggtgttgaacattattagctttgttgtcggggcatgcgcctgacctcccggagtctcaatttcctcctctataaggtggcttttacctctgcaggtttgaatgaggtaagaggtggggagagcctagtacttggctcccttgaagaaagtagcggagactgaatccaaggccaggctgtccactccaaactgggattaggatgtcatggttcttcagcccctgactttcctgacaaaggcccacgtgggggctcttggttggcctggtcactctctgcttggggtgtcctcattcttttccctggagaggttctgggatcaggggtgagaatggggttaagttatctaggaattgagagtcccttcttcataactaatttttctttcctatctcatgacttctagataatagtctgtagttttaactcatttgttatttatataatttctctgtgctcggctctaagggtataagagtaaattagatctggcccttgcatggaagaagcttacagctgaggtggggagctctgtctagcatgcacagaacatggtgctttgacaaagggtaggtgccggggagtgaggtgggagccctgaggaggagatcttaacaagggaaagccttctacagcaggcaggggctgagctgggtttgaagggctgagaggagctaggctggctgaggtgggagggtgctggggtggcaggggctgcactcctggcagagggaatagcacaggaaaggcccagaggtgagctgggaaaccacaggcagagtggtgcagggggaaaaagaggggagggcaggaacacagtgggggaacttagtgcataacaacaatgccctcaacccttttgcctggctcttcaccacgtgagaggactcaggggagaagagtctgagtgctgtgccctttctgaattctttttttttattattatggtaaaatatacacactataaaattgaccattgtgagattttaagtatacaaccagaattctgttcaaccatctgtgctacttacttccagaaccgtccagcactgcagatggaaaccctggaccaatggggagtcactgccgttctctcctccatccagcctgagaacctgtgatctgcttgctgcttcttgaggcctatttggatatttcctatgagtagaatgataggatatgtggccttttgtgtccggcttcttccacttagcataatgttcttgaggttcacctgtgttgtggcatgcagcagtactccgttcctttagttctgtgcatggccacaccacatttttcttattcatacatcagttgatggacatctgtgttgtttccgcctttggctattgtgaatagtgctgctatgaacacttgtgtacgagcttttgttggtatcttttcttttctttttttttttttttgagatgggctctcactctgtcacccaggctggagtgcagtgacacaatctcagctcactgcaacctctgcctcctggttcaagcgattctcctgcctcagcctcccgagttgctgggattacaggtatccgccatcacacccggctaattttttgtatttttagtagagacagggtttcaccatgttggccaggctggtctcaaactcctgacctcaggtgatctgcctgcctcggcctcccaaagtactgggattacaggcatgaaccactgtgccaggcctgtgtttgatttggggtatatgcctaggaatgggattgctagatcctatggtaatgctgtgtttaacttattgaggaaattgctggattcttgaggatgtgtttcaggtccaccctctgttgttgccttgaccttgttacttgctctgttgggtgcaagctctgaggcatgggctagacaccttgtgccaggtcctgttttccatcctcacaagcaaccccaggtggtgggcactcttcttggtcctggttttcagatgaggagatgcaggcacagagtggttaagcatcatacccaaggtcacacagcttgtgagtagagggtctgggaattgaacccagacaggctgtccagagtgcagtctctccccaacacaccccatggtgcctcagagacaggagtcccatagacaacatcctggatggagcctgtagcctcctgatggtggttggaggctgtgcgcacagcatggagcccgagccagcccctggggatgagggctgcaccagggcccactcagccaccctccaccctgtgttctttccttgccttgcctcccctctgcactccttccttgtgcctcctcctcactccccaccagcctcacctctctctcgctctctctctttctttctcttttaataaatggaaatggtttatgggctcttctagaaattgcacctgccttctggttataactggggagagagagaggaagagacacagagaagagacagagaggcctccttcagcagatctgggtatgcccatgggacctcctggcctggacatcctggtggtgctttcaggcctgccacagaagtgaccctgagttggctctggctctaatgtctgagagtgccttcttcccctctccccctgtgactgcctgcaggacagcgcaattcctctgccattgtgtaagcagcccccacagatgatactccatgctagggaattaactacttgttgaaaagcacttgtgtgttcccctggctgaggctgaaagtgggggatccctggggaagggggtggcctggctatggatggggagaaggccctctggggaaatgaagaggggagccccaagccagttcgtcctgtgggagctggcccagattatggttcataatgtaaatttgggagtatgccagggccatattaatactgcatgaggcagtaaggggaccttgggcttgaaacccgagctgtggcctagaatggaactgaacagtgggccttgtcttaaagggacatgacgagctcccagaagtatgtgtcggcattatttccctctaatgctgtttactatatttgtacacaatgcccccaaaggatttgaaaaggaaatggcaatgtaataagagaggtattttttgttgcacatgcgagcatgctcattgacttaattattgtttcttttgttaccttggtgaattagagagggggagatatggagagggaggatgggaagttggagagggggaagagagagagagagagaggagaaggaaacccatgtctactgttattttgctgaaatctatctcagcgagtaggcagattgagaaatcaaggattcattcacaggtagaaaaaaatgaataacactttgaaagctcagaaaatcaacacaacagagaattcagtttcaaggtgccacttttgactcttctgctgctctttgaattgagttcatggctgtgctcatcgtctccatggagaagggcaagtcagtgccatttcttgtaggaatgatcgggccactaacatttgtctagaaaccaagcaaccgaaaagtgcaaatatctggatgctattggcttttgagaaagaaaggatgtcaggcatttatttgaaagggtaacctccatccagatagtgttgtagagcattttctcagacattagaaagattcaactgtgtacagtagttttagtgttgagtgtttcagaatattttcattctttccaaattgggggtccactacattagttagatgcttttgattactaatgatcaagaacactgactcaaattggcttagacagtaaggaaatgtatctcccataagagaacagagttgggggaggaaaggctccactatggatggatcagtggttcagtgatgtggatgaggccctgggccctttcttttcttcaccctactgtccttagtgacagctttataccaagtctgatttctctcatggccgcaagatagctgcagtggttctggacatcacatctggacatggcaatgtccagagtcaaggcagggaccatctcttctggtgaggactttatatatagagaaaatctttctccaaagcccccgatacttctcccatttttctcattgaccaaaaccaggccacttgcctggctccaaatcagtcagtgtcaatagaatgggaatgccctgatgtaaactagacaggacccaccagctggtgagggaatggggtcagtttatctgaggtgcaagacactgtggagaaggagtgggaacctggacaagatggggccatgttagtaacgaggaggagggtgacatcttttgcctccatgaatagcaaagggcagttctcacttaactggggtgcacatggcatcacagaatgctagaacttggaagggaaattagagacaatcttcttcaatcctttcattttacacatgaagaaactgagctccaggaatgaggaggagttgcccaaactcatggatccaccctgggccccaggcaccagctgtgtggggccagtgggccgttgaagcactctagtcaatgccacacagcctgggagcagtaccagaacccagggtgggaaaatgttggcagggcttccagaaactacttgtagggcctgtcattttcattcaataaatgtattgatcaaccattgagtctccaaccctgcactttctgggtggttatgagaaagagtaaagttaaagaagcctcaaggcatctggaagagaacgggttccaacctgtaaggacatattccaggctggatgtgctttctcttctggagataattctcattttggtctcttttttcatattcttactgcctgattccaaggacttacaacagtgtctagaacacaactggtatccataaatccatatggaattatattaattagaactgcatgaggtccagaaagtattgttttcatcttattttaatgtgtatacattggctacaaaattaagtcatggtagatatcgtccagataaaattgtccaaagaaaaatcgaacacggtaccttactgaaagtgagctcatttgaggactgtgatcttgatggttgggtattgactgggttagggggtcaggcagtgacagcggcttagcctgctggtgctgagggaggccggggatcatatccgtgcaggtgatccatgacagccctcgaccccagtgtttagaggaagtggatgggctcatattatttcctcctcttccctcccgcataaccctctgagtagtctttagagccttctcttaccagctaggtggctctcattgtgcatgatgtcaattgcagaaaatgtgagtggggaggtagctgatagataatgagacccaggtccctcagtcccgagctgccaccctaaataaagcaataaagcaacccacaagctgcatcagtgtgcctggtattttcatttctcctctagaaacaggtttctagggctgtcgagaatttggaactcataccacacataccaccatgctgaggtttctaaattcaggctgcggtttctgcatgtttttgagagtgtcagaaacttcaaaacatttgaagagtcccagaggagaagggaatattcttcttcttattattctgagagagcatagtttgcacattcttggcttcttcagcatttggatgctggagctctgttggtctgaggctgaagagcaaactctgccaaagcttctcttaccgtggggatggaaagttttctgtgtctgttttattacttaggcattccacgttctccttcgacatctcacatactcctgctgctttcctttgtgagtggagacctcgctttctttataggtggtaacagctgtgttctctagagagtgaatttttgcaccacaacccctattctcacaataacttcacttggacatcgaggataagtttccatgtgagaaatattgtttagtcatttattttaaaaaagcttttaaattatttaaaacaatttgtgggttacatagtaggtgtgtagatttatggagcccatgagatgttttgatacaggcatgcaatgtgaaataagcacatcatggagagtgaatattcatctcctcaagcatttatcctttgagttacaaacaatccagttacattctttaagttattttaaaatatacaattaagttattattgactatagtcaccctattatgttatcagatagtaggtgttattcattctttctatttttttgtatccattaaccatcctgcctcccctccaatccgccactccccttcccagcctctggtaactctctttctactctaatttgattttttagatcccacaaatatttttacttttcaagttgaactatataatatgatactaaaacttgaacacaccacaaagtatatgcatattcaaaactgaacacacccatggaactaacatccaaatcaagaaacatagctgctttacactttcttgaaataagcacttacctggagatgcaaaggcacttgcgtgctctttcagtagcatttctcttctccagcatcttcccttgacatcagccttgcctgcacattgcccagttgggcaaatttctctcccaggtagaggttaccaggcttgcattccctatgttttagcttctgtcttggtctttctgtgtgtttttatacctccatttgaagcaaacccaacacatgaaaagctatatttaccaatgggaccaactattggggcagtgtctacttactatacatatttttaaaaaactgtttctttaaattggagagctccaaggtgactgatgttaataatttataactatttattaagcacctactatgcggttctgtggtgtgattgcaaggggggggggcacgtccaaggttgagtaagacatagcttctgttcttaaggatgtcccagtctagaagtggagataagctatgcatgagcttgaccaagatcttgctacaatgaaagatagctgggaagagcatgagagagttcaggggaggaaaagaccactcccacctgtggcatggagggtcattcaggaggactacatagaggagggggcactttacattggcacttagaggaatctgccccttgatgggacccaaacttacatttatgatgtgaaaaatggaaaggagacttgttatgctttaacagtaggtgttgctatttaatgtatgaagcttactcaaatggaagagtttgggtttattaaaggaaattagaggtctctgtgttagcagttctgtatgttcaaaatgtgatacaatgggtttacttaaaccattggttgccccaagacccctttcttgaggaattggcagcttggcagagtttgcacctttgaaggctgccctgcaaggataaagacctccatccaaggggaaaggccagaagcaggctcagagctaggtcccacaactctgcttccctgtatccggcccccctgccagctcactcaagcaagccctgtttctgggcagcagcagctgtgaggtgtgggtgaggggctgttgctaggagcagggatccagcttgccttttctgacacgtgtgtttaaattagcatctttaaatgctgttcccgacagttattcaattttgaaactactggggattttggggcaggtggagagtgttaaggaggaggcgaggcaaatgaaaaggcaaaacatttgggggagtttttgaaaaagttaaataaggaaaagagtgtcagctgggggaaagcacatctcaggccccattgcaggaccccttccccagtggagtcatagagtcccctactctgccccaaggtgttggagatggctcatggctcatgggaatgtgcaggaagtcccctgagtcttatttatttatttatttatttatttattttgagatggagtcttgctctgtcacccaggctggagtagtgcagtgacatgatcttggctcactgcaacctccgcctcctgggttcaagtgattctcctgcctcagcctcctgagcagctgggattacagggacctgccaccacgcctggctaatttttgtatttttagtagagataggttttgccatgttggccaggctggtctgaaactcctgacctcaggtgatctacctgcctcgacctcccaaagtgctgggattacaggcatgagccaccgtgcctggtccctgagtcctcttagggtctccagaaatcactatatcaagtgaggtttggggatgggcacatctaagtgataaccacccactaggcaaaaggatcctggtgttgggagatggggtgagaaactggggtgggtgtcattcattcaaccgagtcatcactctcaagggaccagatggagaaagggaatataataagaaaaatgatgatgcttaaaataaatattgataatgcccacattttcagggaacttctatgtgccttagatatttatttatccaagagcctcacttctttttacttgtccgatccttacagcagatctccaaagaggttctctgttatccatggtttacagatgaggaaactgaggcacagagaggcagttaaatcacttgccccaaaccactgaagccataattggcggatctgggattgaagcccaagcttccgggcactagtgtgtgggcctctaatcttgcactttgctgccaccagaaattaggcaccaggatggtaactgaggaaaccagacaagagtgagaatgtaggggtggaggatggaagatgggtatcagggaggttttctgagttgaagacagtctgtcctgtggcttcttaaaggttgctttcagatgagggtgacacaaaggtgtccccctgtcctggacatgatttagaaccctatccacagagaacatgccaaattttatgcacctcagggcctttgcacatgctgttttctttggctggaatcactgttctccctgctttgtgtgttatggttctttctcatctgtcacacttagtttaaagctgcctcctgcagaggctgacacgtcgtagcagttgctccatgaaagtgttgagtaaatggatgaagaataaagctcttggcctttcagggaataactataatgagaaatttggaagatctttctgcagctgagcctttggaattttgatgtcttccaaaagctggggttgttaggagaagaggtaccaaagtggggcttcatctgtaaagacccagctggagctcttgttcacgcctttccctgaggctggaaggtctcttggatgtcacaggctgcctctttaaaatggagacagtggtggactttcctctctgttgaggatgggaatgaggatgagggagcaggcttggggtgagcctaccatccaggggcagtgaactttatatggcgtgggatgaccagtggcctcccctggggtggctgctggatattggctgatggatggtagaggaaacactattctcatctcaattcctggattggtgtgggggccaaatgagatcccatcattcctaattaagatgtagttacattaatgataaagacaacaatggcagctaatacttagagagtgctgctacctgctggtcactgtgccaagccctttagtgtgccttatccttgagtcctcaccagcccctatgtgcaggaacctgctgagatgaagtgacttgcccgggccacacacctggtaaagttggaaaccaactggagccagccccagacctcacattgcataccccagacctcacactggataccctcacactgcacaccctcacactgcataccctcacaccacatatcccagacctcacactgcacaccccagacctcacactgcataccctcacactgcataccccagacctcacactgcacaccctcacactgcataccccagccctcacactgcatatgccagacctcacactgcacaccctcacactgcataccccggacctcacactgcacaccctcacactgcatactccagacctcacactgcacaccctcacactgcacaccctcacactgcacaccctcacactgcataccccagccctcacactgcatatgccagacctcacactgcacaccctcacactgcataccccagacctcacactgcataccctcacgctgcatactgcacacctcacactgcataccctcacactgcactgcatactgcagacctcatgtataccctcacactgcatactctcacactgcataccctcaaacaaggcccttttctgactgtcacttgcaccaaacagaatgcagaagttttctaacttgaacctttgaaaattttttctgttctgtgtttcacgaagggatgtgttaattgttgaggtaattgcagagttccctggctttataatcactcatgttatttattgttcttgttattattagtaaaagccatagtaattcagcctttgggttggaatggcagcaggagccagctgagtgaccttggccgtgatattaatactctttacagtcttccctcgattatccaggctaatggaaagagaaccagtgcccgcaaataatcataaaacaaaaaaaaaatcaattatcttctcagtggagtgttgactgacacgtgggtcctacgccttttatgaggctggccttcaaacacagctgcatctttggtgatatttcagaaagcgtgaggtgggaaataatccctgttttgcaagtcaaggatggagaaggagcctttcatctctggatagagatggtgtgtggatatcaccagctgccaatggaggggtcagtgctgttattctctttcctaaagcaactcgggggtgatggagaaggttgccttaatcccctctgagcatttcactggctgatgtggactcatggaaaatgtcagcgtgctggcccaggccaggcgggctgaagccagtgtgtcttacagctctgtggagcagacgtggtgtgtggcttgaatggaaaggtcataaaggcctgggacaagtgagtggacggagccaatggcactgtctggtaacactatatggaagatgaaattgtagtgtggagctgagaggtgcagggctggggaaagagacctcagcattttccatgattaactttctaatagtaaccatgcgtggacagtgggtgctgggcagcagggagacagtcttctccaagcgtgcattcatacagtgcaggcggcttcccactatctttgggttttctccattttgtctgaggcagggatcagaacatagacctattgtctttgatggcaaagtgaggaggcagccaacttcatgtcctcctaattgactcatttcctccccgctggagtccccaaagcataggtgaccaagagctccctctcagctctaagtcatgaagaaacggatgcttagagaggttacccagaagctggggacagagctggcaccacacccaggcctcctcccttccagtcctgtgcttgggcaggcagcctgtgggcttcttccttcggccctgtccccttccctcagtactaacacgtgctcctagatttctgagcagcccctagagagaagtgacggattcatactagagtgttcatgacttcatgtatcacttgcctgagagtatttttaaatggatgctgggggagggcattgcttaacccaaaggaacaagaagtggactatgaaatttcagtcccagggcctgccatgtgttggcctgttctgggtgctgaagatatagtggtcagcaagacacacatcctctctcctttgagacctcatatttcactgggggaggcagaaacatagtaaataaataataaactaacttcagataatgagaactggttttagaatatgaaacaggctaaggggatagtgatgtgagtgcaatggggaacctgttttatgtagttggccagggagggtctttctaaggaagtggccaatgagtggaacaagatcaacttgcctggaaaaggaaactatgggggatctttgagggaacagtacttcaggtgtgtggaacagcagctgtgaagcctctggggagggaacgaggctggctgctggagagtttccttggctaccctgattaacggcccctcttcctgcctcccttccctattttattattttctctggggcatttgtcaccatcttatatttgtcttaacacaccttatatttctcttatcagtttggcttatcgcctgtttcctcaactacaatgtctgttgcatggaggcagtactttacctgtgtttttcagttctacaccctaggaatgtgcctgggaaatagtggtgcttgatacctccttgttgaatggggaaatgaacaaatgcatggactcagcaagcaaggcagacggtgggaggagatgtgaccaggaagatgggcaggagtcggagggggagaggctgagaacacgggcccttcagtgtctgtgtccttgtctcactgctgctgggaggggctggcagaaactggccttcttgccccatgagccccaactcagcagaaccacccagcaggtcttagcatccccagcctggctgctcccagtggatgcaatgctcattaaccatggagctggtaataacacgcccatgtcctgcactgcactggtgcctcaaatctatgtgttcagccttggtgtaaaatcactaggagccagggacagagggattccagggaccccacgcccagggggcctgagaggctcatccttcgtgtcagcttgtgttttccaggggtggttttgcctgcccggttactgctgtggaattgcctctggcccatttatggtggaggcctgggttccggtgacactgctttctttctgtacaccttgaatgaggtcaggcagctcttcatagagggaggaactcttcctggagtgccaagggtagggtctgcctagtcccagtctctccagcctgagtttgcatcagggagaaaaagcaccagcacctttttcaccaatgcgcccttccccacattcacacacgcatgttcacatgcatgcacatgtatgcaggccggcttcccctcaccttttgttttttttttttttgtaaaaaacacacatccctatgtccacaaacaccctcaccctcacttcctccctcatccacagacacctgttccccagtgatgcacatttgctcacacacctgcagctgctcacacatgcctgcatgagaggccctctccacccttcagtctcccgtacaccggcaggtgcccaccccacaccagccgctcacacaggcacccccgttttagcctcttacacttgcacagggggcccttcacctgctttgcagcaccggagccggagcccagacacatgatgaggcatgagaagtggaaagttctgcaggtgctctgcccaccgtgcaaaggaggaggcagaggtccagctgcctctcagcatatagaggctcagaggcctttgcagcatgcagagcttttggaacgtatcttactttctcattcttaaattcattcgggtaaccactgtttactgtgcacctaccatgggtcaggcgctgtcctctgcaccgggcatactgcagaaaacgaagcagatgcaggccctgccctcattgggttaggtctagtagtggagacagaccacagacaggacaaatagggaaacaggagaagccaggtggccataagtgcacaagcacaaatgaaacagggaatgggaaaaaatagtgctatggagggtgcatggagagaaagctctttgttaaggggagtttggagcagatttcaggaaagggccatgttgcaggcagaaggaagagcaagtgtggccaagacccaggaaggatgggaggagggtggctgtggcggggcggagtaggggggtgggctgtgggtactctacatgatggggatttcttaaacatctgtcagacccaagagactgtgatcctctgaagcccctggatatgtcaaattcatctcagtggccttatgcacccttcgcatgcacctggtataggccagtgctcagaaaacatttgctcctggagaagttgctggttcagttctgtgtggagctgctctgtgttccaagatctgcgctggctgcagggataacagggatggaagagaaccagcccttctcttgaggagctccctgctagtgagggtcaatcaagtgcctggaagttgtgtgtgggcatgcagagtgcatgatatgccaggtgccgggaagcctcccagcccaggggctggagggaggggcactgcttagtgggcagctctttggaggagctgatgcttgaacagagtcttcaggaaggagaggagttagccctgggtggggaggcagagaaggaaagagacactgaaagccgaggggtgaaccacaaatatttgggaaatggcaccagcaaggtgtacagcaggggtttccaaagagttcctgattccctcctcaaagtgatgggagccacacttcctggcttatcagttggtccttgccctctggctggtgctgtgtgtctgagaggcagcctaggaagacctctctggggagaagcagagaaagatagcgacctctgaacgtgctccccagaattcagtcaccccatcctacctatgagaggggacaaactggcagtctacaggtgtgtttggtttagcccatgtggcttcattgttttttaattttttttttcatcaattgcctatatttacaaaggagattttggataaaaatctggattgctagctgtttttgaaaaaataaaagattgaaaatgtacctttgtgtgcctgtgtcccctcatggtgatgattggtttgggcagagccattgcacgctctcctttcccccccatcccccggtgctgaatgcagcacccctcactcaccgtaacaggctggctcctgtagacacatgaccttggatccttttttggattaaggaagcaaacatgtaggattgtgcttctgcaaattctcagagatggcttttgagcccttaagctcttctggggcattctcatttctcaactagagctagcgggtgagagccctctctctgttttcatctgctgcaggacagctggacttcactgtatctcataaagaaaaggaggtggggtgggcagggccctaggctgtattactggaaaaaaaacaaaaaaaaacaaaacaggcagtagctcctggtttctgtaaaaatggtgtctagacgtgagtgaagaggcagaaggtcagaggggatttggaaatctcaaaggctgagcacagagcgcccacaggtgcaaggagaaagtacagggccagggccagagatttcctttctcttgttcctcagcttattcttaccctattccacccaccctgccactgccaggtgctcagcgagtctttattgaaagagagattattaatatggtgaaatgtctgagatggttctctctccgcatacccagtaatacagggtccctttggcttgtgggagtcacatgtggccattttcagtagttgggaagcctgggggccagctgggagttgtcactgcgttgggaatctgcctcctgggcctttttattaaggcgtggagttgtgtgctgttctcttacctctggtccctgcttggaggaagaggctgaacttgtaccacctgggcaagccagtttgctgtgaccacacatggattaggtgccagatgaccacctggggaatgtgccagtcaggcagccaggatgcaaagtgattcgcttcccccttgccagtattttctagggcgtggtgtttgcccgcatcttctggtgaggcctggctatctctgaggggcagaccagcacacctgtgggtgcagcagctcacaggagtctgttgggcggcactgccaggccctcgggaccctgagtaaggtctgacgcatcagggcaggcagaggggaggccacatttcgcctgccactgatgttagcggggaggccccagacccaggtgccaggcgggcaaattgatttttcagcctgcgaaacttctaaagataggcacgggtggtgctctgtgctggcactgggagtgacaggccatctgtgagtcacagtcccgcccgctggaggagtgcaggtcctgggcaggcagcactgcggtgagaggggcccagatgcaggaggggagggctaatgcaatgagcttgagtcagccctgcttgccaggccaggatcctcctcccaggccggcaccaaggagagtgttctactgcctggctccaggaaaactgctgctgcctgtaatttatgcagtttctatggctgagtggagcagacatggcctgaatggatcattggagtggtttgtgcttccctcgccctgtggcctcacatatttaacaaaattggttgcttggtttatttcttgaatcatcacttgaaatctctcagcttcattctgaattcctcatccctcttctccccttgtttcctattttctttgaattatttggctggctctttttgatatttgtgacattatcttacatttatgcagcactttacagtttgcaaagctctttcacatacattatccaggcaacacatatttactaagctccaaggccttggaataagtgctaggctcccgggaggcagcagtgcattcgatagctacggtggctgctctcagggagacagtgataagctactgctaacttgtaggaagacaatagcgtgagatgatgctgagggtttctttgtgatggatgggaaaagcctctccgaggagaagacatttgaactcagaggaagccagccaggaggaaatttgggggaagagcgttccacgtagtagcaccagctagtgcaaaggcctggtggcaaggattagcttgcttgtttctgaaacagcaaaaacgccactctgagtggagtttagggcatgaggtggtgatggtgggggtgggggaaatgctgggtagggggaggctggcaggggccgtttttcagggctttgttggccatggtgaggagcttggatttccttctcagtattaggtgacatattggaggaatttaggcagccacgcgtgtgatctggttaacactggtgaagttcactcttgtaacagtaaggccagggagtaagggcaggagtggaagcagaagggcccctcaggccactgcacttgtcctggtgggagttaatagtggaacggtggcttggacttaaggctcaagtcggatataccgtctcagtccttactatctggaagtccaagatcatggtgttgacagggttggtttcatcacaggcctctctgcctagcttgtaggtggctgtcttctccccatgtcttcacactgtcttctcagtgtaagtctgtgccctaatctccttttcttataagggctccagttatattggatgagggcccaccctaatgacctcattttaacttaattacttctttaaagaccctgtctccaaatacagtagatgcccttatctttaggggttacattccaagaccccagtggatgcctggaactgcagatggatagtaccgatacctgtatatactgtgttttctcctacacaggcatatctgcaataaagtttaatttataaattaggtacagtgacagatgagcaacagtaatgaataataaaattgtgcaattataacaatatactgtaataaaagtcatgtgactgtgctctgtctcattacagagcacaaaaattcctcattgtactgtactgtgggtaactgaaaaaatgaaaagtgaaactatggataaggggggactgtggagtcctaattagggaaaaggagtcaggctggtgggaccaggggaaagcaagagataaagcagataagctataaatctgcctttcttcacgtccagagaatttaaacaaaagagaaaccagataagttacaggtctgcctttctttgtggcccagggcatatggcccaggatatatgacccaagacatttggccttcatgcccggataacatacataactcccgggcttcctgctcaccatcaaacacctcaatttatcaaacatccaggctgacagaggaatgcaagttaagctccctgctgccttggcattatcaatcagcccaagttccattctctaaaatctgcagcaagcttttgtcttctggaagttagcttctctcaggctaacttgcccattgtctctcaggcaacatatttccccactttctctaataaatctgcctttcttgacctatgattttcttggtaaattcttttacccctgtgccatcagcctgcattcgcccatgacagggacgactgtatagtcacatcctgaggtcagctgacagtacgcagatgagctatttaccagataagatgattaaataacagtcattaaaaagaataaccaatctttattgagcacttactagatgccaggcattccccaagcatcctgcttgctttatttctgcatcacagaaattctatgaactaggcattgccatgattttctctcccttagagataaagaggctgtggcttgggaagttttaataacttgctgtgttcacacagccaggcactgggagatctgggacttgcaaacgtgctcttttctgactccagagtccattttcttaactactatgaaatgcttcctttaagaacttgtcccagaagagaatggatgtttcaagttctgaattatacttgatttctttggcattgcagaaagtagacagatttcctgtatggtcctgtattaaacttgtatgtgaggggtttttgactgtctgcatcagtggttctcaaaatggggtccctgggtcaacagcatcagcatcacctgggaatttgttagaaatgcacattcttgggtcccagcccagagctgctgaatcagaaactgaggctggggcccaggacgctggtttaacaagccttcctggtgattctcatgctctatgaattttgagactgctgatctgcagcagccccaacatactcacaggtgtttgcatgtggaaattcaaggctcgatgtccttgaggaaccagacttccaggtttcaggtcggatgaggagtggagcagcactgctcactccatgtgttgttaatcggcgttatctccatgtgttggagatatgttatttccatgtgtttccacatggaaagtcatctccatgtgttgttaattggcgttatgccaaaaaggtgttcagtggtcaatatgtttcagaaacataggtttctccttttttatttttctaaagaagcagggcctttcttgttgctcaggctggagtgcagtggcgctgtcatagctcgctgcagccttgaattcctgggctcaagtgatcctcctgcctcaggctcccaagtagctgggactacaggcgtgtgcccccatgcccagctaattttttcttttttttttttgtagagacagggtcttgccagagaaacataggtttcttggttacagacctttcatatgttaattattattcttttgctgtttttgaagataacaatctttgtgcttcccaggcttatttgatcctgagatcctttgtttgaggagaagagaacaggactatgtttgagaaacctgcactccatagaggcttccaggagaggacataaataattgaattgggatcctcacagtgacgggtttctttcaatcagtcaattaagtggtatttactagtaggtatgctgtatttcttcctgtggcagaagctatgcacaattccagaaatgaatagggatccttatttgtcaaacactgactctatggcaagtggagtgcaagaccctacaaacttatgaacctgataccatcacccaattagcagatgagcaatctgaggtccaggaaggtgacattgcttatcttatcactgagcaactgtggagctgcgattgtaccccaggactgtgtgaatccccaaatctcttttctttcctttctatactcctgtcatcgcttggagcttgaagtggggggtaggagtggggagaaaggagcaacactcatggaaggagaaccaggcctccaagcagcagcagtgggattgtgctaattgggttatgatatcagccccataaggttgtagggtcttgcactccacttgccatagagttggtgtttgacaactaatgatccccagaatttagctgtgccttgctgagggtgggaggaggactgttagcccagcagcattgaggagtaaagtggataacatccagtgagccattccctagcacagttttaaaacataacgttaatttttgtttttcttattataaacataccacatgcttcccgaaggagattctgaaaatacataaaagcataaaaatgcatatccattaggatggctattatcaaaaaagttggaaaacaacaagtgttgacaggatgtggagaaattggaacccttgtccattgctggcgggaatgtaaaatgatgcattcactgtggaaaacagtatggcagttcctcaaaatatgacacatagaattaccatgatccagcagttccactttggggtatataaccaaaagatatgaatgcaggaaatcaaaacgatatttgcaaacccatcttcataacagcattattcacaataaccaagaggtagggccgggcatggtggctcacgcctataatccgagaactttgagaggctgagtcaggcagatcactgaggtcacgagttcgagactagcctggtcaacatggtcaaaccccgtctctactaaaaagacaaaaattagccaggcatggtggtgtgcacctgtaatcccagctactggaggctgaggcaggagaatcactggaagctgggaggcggaggttgcagtgagccgagattgcatcactgcactccagcctgggtgacagagtgatactctgtcaaacaacaacaacaacaacaacaacaacaacaacaacaaaacccaacaaaatgacaacaacaaaaaacagtaaccaagaggtagaatcaactgaaatgtccgttcaatgtggcatagacatacagtgattattctaccttgaaaaggaaggtaatcctgccacatgctacaacatgggtgaacacaccttgaggacattatgctaagtggaataagccagtcgcaaaaagacaaaacacaatactgtgtgattccacttatatgagatacctggagtaggcaaattcacagagacaaaaagcgaatggtggtggccagaggctggaggtggagggaatagggagatgtttttggttacagggtttcaccatgggttgatgaaaaaattctggacgtggatggtgatgatagttgcaccacaatgtgaatgtacttcgtgctatagaactagacacttagttcaataccagcctaggcaacgtagtgagatcatgcctttacaaaaagaaaaaaagagagagagagggagagagcacctctacaaaaaaaaaaaaaaaaagaaaagaaaaaaaaaagaaaaaggaaaagtggttccaatggtaaattttatgtgatatttattttgccacaataaaaagagcataaaagtcaaagcaggctgagtggggggactcgcgcctctaatcctggaactttgggaggccgaggcaggcagactgcttgagcctaggagtttgaaaccaccctgggtaacatgatgaaaccccatctctacaaaaattacaaaaaaaaaaaaaaaatagccaggcatggtgatgcgtatctgtagtcccagctacttaggaggttgaggtgggaggattgcttgagcccagggggttgcggttcagtgagctgagatcgtgccactgcattgccggctgggtgatacagtgataccctgtctcaaaataaaatcaaataaaaatgaaagcagcagttaaatcctagagatgattgctgttcatatttgaatgttttatgtcactcttttctctatgcatttagatgcatacataaatatcttcctgttttatcaataattctttgaagctatgcttttaaatgatgcatattagtttcccaagtagatacactgcagtttacttaaccatctccctattgttggtcctctgagttattttcagtttttcagtgtttcaggttgcactgcagtcaagaactgaatatgtccatttttatttacatcacagacttgtttctttaggacagattcctagaagcagaattgctgggccaaaggatgcacatgttttttaagattctctatacattgccaagttgctttccagaaaggtcatgcagctttcatgaaatctcaccaaaagtgtgtgagaaagtggcttttctgttagctttccttcccttttcaagagggagctcaggggatgcagagaaaaacaggaaggcagtctggtcccttcagatcttggagctgggtcatagcttgggcatgttgtctcttgggcagtgaatgggcacctcgttagagcactgggacagggctgattggcactctggccacccaggagcgtggagcctgcctgcaggaaagaacagtcagttcatggataatcccttgatattggtgctctggttctagtccagagatttttatcagggctgactgcaagttcagctctgggatggggcagtgggggtagtctgctgagctggtcagactgagcttcctgattcggtcctcaggtcatttcaagggaacacattggaaagtcatctccacgttgctcttctccattgtacgcaatacaacattttaaggaacaaacagtaccttcttcctcatgaacattattctgtttaacagggagccaaacgaagttgcaagagtcctcattttcccatggtgttccatagagctgtttgtatttttaataaaaaactaataattcagaggctgcaaagcatttgtttttaaatttaaaaatgttttatagactatggaaacaaaagtttgcttcccctgcccatttgggaaacagagcactgctctcattcttaggggacagcatacacatgggtctgggatgcatggcctgctcctctggaaggaagttttgccatgggcggctggaggggcttcaaacactgagccagagagagggttaggagctgagggcttcataggaacatctgtcttttactctctctcttcatatttcaaagctctctctctctccctctctaacacacacacacacacacacacacacacacactctctctctctctctctttctctctctctcggaacatctttctctctctttcttcatatttcaaagctctctctctctctctctctccctctctaacaaacacacacacacacactctctctctctctctctcggaacatctctctttccctctctctcttcatatttcaaagctctctctctctctctctctctccctctctgtctctctccctctctaacacacacacacacacacacacactctctctctctctctctctctctctaggaacatctctctttccctctctccatgtttcaaaactctgtctctctctaactctctctctctctttctctctctgtctctctgatagatgcatacagatttggtatttaaaaacatcaactctgactgtgttcttggtttctctctaagtataagaagccaacaaggctccttgaagattccctcttttgatattagaatgatcttgaaaggagctctaaccatacccagagtaggggggctcccttaggttgaacccctagatgtgctgcagccagtggggagatgctggaagaaacagattgaatcatggacctgcccatcagggtcatctgaggagtctcactgttggtggtttcagatcttccagaagaaactctaattagctctacacaagagccagaggggttagtcaccaaagagtgattcaccccatcactctttggtgaatttaaccaaatttaaatggtgatagggaattccttttacaattccctaagaggaaatgagagaaagagttggtctttcccaagcagcatggttttcagggacttgcttctcctggtgccttctctagtcagttgccaaatcctcgtggctcaactcttctccactgctgctgtctcttttctagttcaggcttccattgctgcttgcttggactcttgcagtactcttccagctggtctcgtgactctgtcatttctgattagtcatacatcttactacccacttaaactttctaaatgttagctaattacttcactttcctccacaaatactctttcatggctcctcattaaccaaaggaaaacaaaaagtccaaacttctcttcttggtgctcaaagatctccatcattcctccctgtgttcctgggctgcaacccacataactagtcacccctatctcctgccttatgtgggagttcattttatcttttctgctttcttgtctgtgtatcctgaaattccactcattcttcatggcctggggctaaagccaggaagcttctgtttttgatgttctaagttagaagtaacatctctctcctctaactaatgagcttccccccaaccaaagcttctaccccatttcctctctaatggcactaatcttttgtatcttctgttagggtttttggaatactagtgacatctcctagagccttgtaaagctcttatttgccttcaagtgccccccattgccagggcatggagccttgcacagggcaaatattcagcaatgttggatgaataaatgaagagtgaccaagggttgccagtggtagtcagtctttattttcaccccgcactgctatttgccctgtactcacttggactggttcctgctggtgagaaacttgctacccaggtaccacttattttaagcacatttatgcatttccaggcacgtagcaagggggcagcaggttagtgattcatgagtaggtggaaaaggtgattgccttgagagctgctgactcagccgccagccgttaaccctggtgctcctctgggccctgaatcagtgagtggatggcatgaatgaacagatggccaaggaatctcaggagacccgagtctcctggatttggactttccagcattagaggtgcacagcccagagcctcacagggaatgctagaagctgcagtataatcatggcacattttcctggagaaccagttcttcttgaaggtttgggaatgaatattattttgtattcaatcacatttgtcatgaggaggaataaaatatgcatacatattttaaaagataaaatgcaacaatttaaagaagcttcctggctggacatggtgactcatgcctgtaatacctagtgatttgggaggctgaggcaggagaattgcttgagcccaggagttcattgcatcatagtgcaatgagctatgattgcactactgcagtccagcatgggcaacagagtgagaccctgtctctaaaaatataacaaaaataaaaagataaaatttaaaatatatataaagaaactgtctgcttgtggaaggcttgcttcaaattctaatccagactccctgaggtaggaggtaaaagtttcttcttttctgccttcagggctgtcatgggaaagtttgcaaggatctgggctagtctggcacccctctcggttgctcggttccccatcactgccttcccactccatggcttctcctctgcagggtgtagactatgatgaaggttacacttgaagagcagtgaaacagaactgggttccaatcctgccagctgcacagacaccatatctggagggtgatggggcaagggacatgctcactctccctttccagaagagataaagccatatgggcaacctgctatcactgtgaaaagtgagtggaataaattgtatagtgagtgaagtgtaagctcatggcggcagtgtaagaaacacattcttgccaggcaggcagataaccaagaaaggacaattgggaacacgtcagctgatggagatgctacccaattgtatccctatgtggagagaccctccagcaccatatcccagccacctgcgccctgccccccattggaccccctcttcactgtttgccaagctgaacattggacatgtcacatgttccctccctcagtgcctgacttactaaacagaaaatgcccagtgaaaacttaggtaagatgtcgcacagtgtttggcacttgataccttgttgctaatatggtggggaccccttccagcactgaaaaatcccgcagcacttgtggcagctcaaacagagaatgtaccagtcactggctcccctgagtttcttcagaaattgtttaaggagtgctggatccatgagggcagaggcttgtcccagtcactacactgtctctacctgctggaacaggtgcttagtatgtacgcctgctctgtgctgggcccatgactgcacaaggacagctgacttcagaggattgctcaggatcactgagaaattcatttggcaaaatattgtgaatttaatggcctcttcaatttgaaataaagccacccggctttttgaaatagagcttcctttgggagcttagaactaaattcttggcttcatagaatgccctagctgggtggacggagaatcccaacatatagatgtatctagaatgtcagaagtgaagtgatctgtctctccaaatcattggtgctagggagaaagaggtgagcatgctgtctttttaaaggattcaactaactctcagagctttggaagaaagaaaaaaaatccaaaatgtgtactaggtcagtttttatttggaagatggattttattgttatatttttaaactaggaagtctcttaccactcccattctccttccctggcctagaggggtgggagttcagatccctgcaacattttaacccaaaaagctcttacctgtttacctttctttgatagagttgccaagtggtcttggttttgttttgtttttcttttagaagagaggatctagctatgttgcctaggcttgtctcaaactcctgggctcaagcggtcctccagcttcagcctctcaagcagctaggattacaggcatgtgccgccacactcagctcaccgagcggtcttgaacaaaaaacccaaattggtccaagtatggattatacactaatgatatttatcaccatcactatcgttgtcattatcagttttattatagtgacttccagttcggtatctattgtgggtgcttggagcttttgcacatgtaatcttatttaatcctcacaccaacctaggaggaaggtattattattattgcccttttccaggtgggaaaattgaggctcggagagttgtaagtggcttgcctgatgacaaagggtgggtgagtggtagaggcaaatttgaactcagtgaagaaagagttcaggctttgctgtcagatggactgaagttcttctcttggtgtccatgggggtgccagagatgtgggggttcttctttctccttccaaatcagacgcaactgaaagtctgaggactcagcttcaatctgagctctgatttctctagagtatccaggatggaaaaggggatggtaagatgaagtttgcagggagggcttcctggaggagagggctctgaaacatgagagcattcgggcaaataggaagggcaggtattttggtggatccagaggcaggtggattcagaggtgggtggctcaagagtacgggcctccgtctcctcgtcttcctaagcatatttaactgtgaatgaagcaagacaagaggtgtatttctccatgtaagggaaatgctatgaagaaaaggcatttctggtgtcagaatcacgattgtcagtgggagtgtcaggaagaaacttcgtgactttttctctcttcccaggcgcccccagctgttaggtttcatggcaacccaatgtggtagaaggcagtttcttttccattcttgctgttagatttttatgttgtgtgaccttggggctgccttagggcctctctgtccttcatgggtctcacctggcagaggagggggatacacagggtgatttccatagggacttacagctctaaaatgctcgagtgtatgatctaatcatgatgacacacagtcagccacagtgaaatccctgacacatctcaaatttgaactgcatctttatgagtggaaaaactgtttcctgccccacaggacattttgatttaactaggacacacctgaccctggtctgctcacagacagagagaatttgttctgtggcccaaggcctctgcctgcccctgctcccaccccaccatgggtagcagtggccacgtggtacttgaggacagcatcctggaacttgcccaggagtccgctgcatgctggctttctctcttctgcagagacgaggggcccagatcgggtcagcctctgctcagctctgcagtcttgccagggggaggaggaatcaggctggggggcagggatagagggccgtgtgcatcagggaaggaggccctgagatgacaagctccatgagtcactcaactggccgctccagccagagagcatcaaggaggggtttatgacactgcctcatgcagcagtgatcagccatgaggtggcatccatccattgtcaggggacagtccatcctcctcaggcacatgcacagaggattgggtgcagaggagttcaccctcaacacctctgggtgttgggaggcaggagagcagtggggctggaggcacagctctgccaagcattcctgaaccaaagcaagccatcaatgagtgctcacaccgtgcaggcactgtgagcctgtgtccacatgatctcatcttgtcctcagggccatgccaagaggaggcactattcttcttcttctcagtttatggatgatgataatggaggcatagagaggttaagcaacttgtttgatgtcacccaacaatgctgaaatggggcaggatttggccctggccctccagagcctatgggcttaattgttgccttggtgggtcttagccttgagcctgcattagaacaacctggagggcttggccccactccagagtttctgatttcggtcaggtctgcgataggtctgagaatgtgtgtttttaataagtttccatttgaggtaaagcccagggaccacactagtctgtgctgtactgactcatcatcccgtctcagtttccaacctccaaaaccagagggttgagctttctaccagttctctccagttgaccagttaacgcagaaattccagccttctaatcacccataattatgtttagttttggacaacttaatatatgagagagcaatagtacttcagtaaactcctctactgctactgggtttctgtcacttgtctcctcttatttttgacaatttgatgttttgtgttgtgaggcttcctttgtgcctaaaagtcattgacttttagatactcactttggattatctccatcaatgtgaaacctcctgtgttgccttatttaatgtcttttgccttgaatttcacttgcttggataccattgcctttaacttggcatcactccttagcttgctttttacagtttggtagagatggtgtctcactatattgccctggctggtttcaaactcctggcctcaagtgatcctgccacctcggcctcccaaagcagtgggattacaggtgtgagcctcacttgatttttgcctggcatattctggtttattcttttacttttaaccttattttgtcacttggtttagggtatatttcttataaacagtgtataattttatatatttatttattatatattattgcatatagttaatactatatataatgtgtaccacacattttgattgtaataactaatatgttttggcctttctgttttttaaaaaatgctttttgcagtcttttttgtctatctgtaatagatatttaaattttttattttatacttttctttattaaattggaatgtctacccatgctgcctctcaagtatttaaaactattgttcaaccatattttgccaatggttaatgtatagagtgaaatagcctcttactccttgccacgtaagataaataatttttcttcttttcattcccccattccataatattacactcatgcttttatggtataatctgatatttaaaacttctacttattattattatatttttcacattttatcttctcttccaataaattttagttttcattttcattttgatttgtaatcacagttgtaacaattatttaaacctaatagatcttagggttcattgccagatctttattaccatggacatctcctgttgttgaattccttgttttgattaatgtcttaattacaaatatgaaaaatttaacacctgtttaatcttcttgaacaacgtattctgctttatcgcactttgcactttgtttcttttaatatgaatgacaacttggccctgctgttgggttttgcagaggagacatcagatatcagcttgatttttctctttttttttcatagataatctgatatcttctgtttggatgctgataattcttcaccatgaaattaaaatatatgtatgtatgtgtatatatatatgtgtgtgtgtgtgtgtgtgtatgtgtgtgtgtgtatatatatatatatatatacatgcctactgagcattttgactttcagacttgggtctgtcttctgtgttaagaaacttttttttgttttcgtcttttcagttaggtttattctgaattggctgcctgtcctctatatctgtcatctttttgtataatctgtcttagacctcacagtatttctgcttctgtatttttttcctcttcattttgagagtgctttctaaatgtgcccttcataacacatcttgtttcagaaataagttctcttgacttttactgcagacatagaatagatggtttctccaagttcaattatcacaatatcacacgagttgtttactgagcacagactgtcctctgtgcactgtgctaagcactttgtgtgcattacctcagaacaactccaaggggcatgtgctttgtttgtcctcattatatagattggggaaacgcatgtccagagggttgagccctactcagcctcatctgggtactgactgggggccaggactcaggtccagccagtttcacagcagagcctgtgctcttggccatgatgataatggcactttcccacccagtccttttttttttcaaatttatttattttgagtgctgcattctctaccttttatagttaagaatgttttcaaggtctggtgggaggttttcgtgttttgcatccatgaatgcagtcagtgtttgcctgtaaatagggagggtcaattctcttgggctcctctgctgtgcacctcattgcccatagaatgctactctcggatcttgcactagagcactggatgatgaagtgaagccttgcagagacctgtgagtctgggtgagtgagctggaaccatgaatagttccagaaggggaacttaatcctgtgatatttcttctctgtgtttggtaaagccactgcaccttgtgccaactgtttgcatctggcttgctgtttaacctggccaacatgccaggtacaaactgtgcttggacttgtcctccttcctggagctgccacctgctgtgtcagggacaagcccctgccctggccagttttcttctggatgtatctgccatgtgattcccagggcttctcagagctgctgctgctgctgaacactgctgtgatccatagtgaccagggagtcccggtgcctgatacttggctcacctccctgttcagccctactgatgtaggcagctctgatgtgaggttcttcaagggcctcactccttgtttcacaaccatcctgccgcttctcagggagcaaagctgcccaaggggcctccctgccttctctttttctgcataactgatttttttttttcagattcctttaggtttttggcacattgatggcacctgttcctagtttgctgagctgtggcaggttttccaggcatactggatttgttttgattttgaagcaggaatctgggcaggagggcattgcatgcctgagctcttgttgccatggtatttgtaaatggacaaatgtaaatgaagccagtggcagcatccttctccctccactgcccatgctcctgagtgtgggaattgggggacaagtcactacttcttcctgacttctcctttactcacctgcaagttagccacatcttccactttctcccttattccccacctcaaatacaaagtcctaggagaagaggactgggagcactggatttgatattgaattggagaagaccattacaacctcagattctaagattctgtgatagcatctgtcctggtgatctaagtcgggttaaactcagctctcttttaggagatcaagaggttttataatataggttgggtcccctgccagttcttcttacatatcacacagtcttagtttggggacacagtttttggaagcctgtctgcgggggttctggaactcaggggtggatgcaagaaagcagcattggttctttgtcacgaggtgagagcaacagtgtcaggaatagactctgtgagctcacccaccctcaaggggcatcgacttccagtgcatcactttcaagttcatctgtgtctggccataggcttggtcacatgctgaggtttagtgcatgaaccatcatgtctactgaggtacctgacactccagaggcattcaatatgttatgcaaatggccttcatgcccaggctaattagggagtccccattggactttgattattcataaaagacagttgataataaagccctggctgcttttgaaaattcatcaagtaagaatgcagggtttttccagtgggagctcagacaaaaagccagtggaaggacacaataggatcagtgctgaactcccatggttagttcgctctctgagatgcatgcacagacctctgcagaggccttgggcaacactggtccttttgttcgcctgggtccttttgtttgcctggtcagcagagtagagggtggtgtcctagtgaggacaaaggattcaggaagagcaaggtagtgtgggtaggggctggtaaggatggcgagtgggaagacaatgagcagagctttggagagcagagtttgaagtacttgtgggacaccaggtgaagacagccaggtgacagcaggagccaggtgtcctcaggctcttgctagtgctgtgtcctggtcaacacacttaatctagctgaacttcagttaccttacctgtatgtaaaatgaggatgttcatagctccctcacagtgatgttgagaaatcaagtaggtaaacaaacatggtatatagctttgggggcccactggtctgacagggcgctcaacctgtcctctttttttttttttttttttttttttttgagacagtgtctcgctctgtcacccaggctgcagtgcagtggcgcaatcttggctcactgcaagctttgcctcccgggttcacgccattctcctgcctcagtctcccaagtagatgggactacaggcgcccgccaccacacctggctaatttttttgtatttttagtagagacggggtttcaccatgttagccagtatggtctcgatctcctgaccttgtgatatgcccatctcggcctcccaaagtgctgggattacaggcgtgagccaccgtgcccggccctgtcctctctttcttgaatggtgctccttctagagcattccttgtaacatgcatgaggtggtctcttatcttgaagacccgcacctggtgaggagggtgacagacaggattctgttgtcaaggaggtggtaggaatggagtccagggtgctgctaagggagggccaggctgtatggtcaggtgggcacagctgcatggaggatgcttcaggggctctggagaagaaatgagtgacagagctttcaaggaccaccttctaggggtggggcttccaggcctccaaggagggctctgtgtctttatcagaccgatggctgcccagaacctttggcagaggggctcagcctgccttggtgccagtgagcttccacacaggaagacttcctgaggctggtggctttccatgagcaactacagggaggaaccgcgggggtactggtggctcagtagcctctgcttcctctgagggaatggaggggtcagtccctggtgtgggggtctcttccctgtcctctgctcatcatgaggctggctttcctcttttgcccaccccttgggctgggaccagagcacagccagtcaccagtatggtggcccagcacggcaggctgtgcctgtctgtgtacacgccagctccatgaggtggaagctttggcaatgggctcccagggagcttccccgcaggcttctcaggggaatgtgttgggagtagatgcatggagagttcgttttttctccctttcatgaatgagaaaacgggcagagaaatcacggcactcattggccgatgtttctgttggtgcagattaccaagggtgctgaagtcaaaaggagtgagccacagtcagccctctgggtggttgactgccactggggcctttagaccaggaaggtgtcgtgaccgaggtggacctggtggtgagatgcaaggtgtggcagcctgatgcggaggtagcagaagggagacaggccaagtcagggcagccggcaaggggcccatcacagagcagtgcaggcgggaggccacaaaggcctgggctggggtaacgtgggggctggaaccgggaagctccttcacacattgagcctacttcttgggactctgttccagtatattagtaatgttaggaatttcagtttggctttttaaaaagctgtttttcctttgaggaactcaaatattattggttgaattgtgtctccccaacagataatgaagtcctagccctccgtacctgtgaatgtgaccttatttggaaataaggtctttgcagatgatcaagttaagatgagatcattagcgtgggctctaacccaaaataactggtgtcatatttataaaaaggggaactttggacacagagacagacatgcacacagggagaatgcctataaagatgaaggcagagattgcggtgatgaatctgtaagccaaggaaggacaagaaaactaggagagaggcctggaacacatgtgccctcacagccctcagaaggaactgaccccaacgacatctccatgtcagacttctggcctccagacctgtgagacaatgcatttctattatttaatccaactcagtttttgatactttatgatggcagccccagcagacgaattcaccaagcttcccggatcccatttcttcactctctggaaaactgctccctctggtgtctgagaatcacacgtatgacctccctgaggggctcagggttggcaaggcctccccatctgggtggtgaaaggtgctctctgggctgcaaagaatccagacagctctgtgagcagcggctgccaattcactgacattgactgactctggggactctacccttttcatccccatgtgcccgtttgtccagcccctgcagaaacccctgtggggtctggcagtaagcgaggctgctgttccagggaatgtgtgtgctgaggctagccaggcagctgggctagcctcctcctgcacagtccttcttaggaatgtcctaagtacctattcagccctggcctgaagcaaaggaggcactgggtaatgaggactgggaccccattgctcatggtccaattggcgaaatgccagattaagcacagatcacttttcaaagtcaaaggcaacgtggtgagtttctttggcattaaaagtcctctcccatggttatcccattctgagtagccagttgtgtatttattcacccagccctgtgttgcggttattgtcttttgagtgtttgattctatcccctttatatgactcatcagcccccagaaagcaaaggccctgtcttgttcagcctggcacaggggcagccgaaattcccacagggctcacctccttcgcctctgcctgagatgtcttatcagcgtcactctcattctgcaggggaggaaaccaagactccagggtggagtgattggctgtatgtttcacctgcagccacgcgaggcccagaagtcttccagtgctttggaggttcacaagaaatatggtgactcaactggaaccacattagaggtcagcatttaacaggtcccctcaattttcccacaagggccagtcttgtgtcctcggctatgaccatgagccactggggaaagagatgctctcttccctgcagctgcacggctccccgtgctgggttggccacacactccccacccagtgcacctccgttgattgattgacgtggtgttaaacatgtggccttttgcaggcaactctaggagggtgatgagctttgcaaatctgcccagtgcctaaaactgaaccacacacataattcactcacacgcactcgctcagttgggcgtgcattctcactgccatcctgcctccaactcacgcttgacgcctcacagttctggacttctcttctaccacacagcagtgcctgccctggctggccagtactacattcctgacctttgggttttgggtccctgggggcagcttgctgccatccgaaccaccaggccctggccctcagcgaggcttctccaagtgttctgctgccttacttctgctttcgaagcaccatgcctgtcctggggtggagtcagaagtcagaagaagaggctgattagccggggtgcccttggaggggccagggtctcctgatctgcagccagggctctgcatttaggaagccttgtcagaagcctgcaattggcattgaatctgtttagagtgctcaacctagtgccaggaactgtgggaaatctgaagacatgatcagtttccagagagtcaagacaaccagcagaggattcaggttaataaacttagacttgtgttcagctacctggttcaaatccccattcactggctttgaccacaggagaatgatttcacttctctaagcttaatttctttgtaaaatttcacaaggtattatgagcattaaatatgataatacatgcagaatgctttagtacattgcataacacattgtaggcactaatacatcttaccttacaatactctggcctctcctctccactcccatacaagcgaggactcttagacagtgcctgtcatgtgccagacatctgtaaagggatcatataagcattaactcatttaatctttacaggaactcagggaaagactgaggcacagactgacgaacttgtccatggttccaaggtgcagaaccagggttagacctagaccgtgaggctcttgcatctgtagtcttgcttagagcactacttgcaaagaagccttgggtaacttccctatacctccatttcatcatctcgaaaatctagatgatgatgataccagctaggatcctcaggaaagttccctgaacttcattaagggcttagaatgatgcctggtgcatcctcagtacagagtaaatgcagtggcttcaataagaaatacaagtacacaggtggccaacaattcaagctattagatgcagaaggccaaggaggtgatccagctctttcattatggggaatcagagcatgcagatcagcaggggctgggttatgagagatgaggagtgggctgatccaaatgagaggtcagcttgagcagaggggaggatgtgggaaggcagagagtgtggaagccatgtgttgggagcagggtctgagaacatcaggttggggacagcccacgagggaccttcattagcagtgtggattttcacctgcactctgtcggcaagcactgaaggttgtcattagcacactggctgtcacagaccagaggggcttcccattcagtcaaatcttgctgcccatccccagtgaacggagcagtaggcagtgaggcgggaccggcagggcgtacaagatgctcgcccattccctccatttgaattgggcttgggacatcccaaggggctgctgcctgggccctgaacacatctaagggctatgggtttatggtctttcagctgctgtttatgtcacaaatgcctgtcacagaaggggcattaaaaataaccgaatggctaataccatttctcaaaataactacttgcaaagtgctttgctggggcaaatggctactaaaattagactccctggtggtatatgtagggtgtgtgtgtgtgtgtgtgtgtgtgtgtgtgtgtgtgtgtatgacttctaaacccatttccccccagggtgaggcccacagtttgcacccttttgttctgtggtcccttctgtcatagctgggtgtcccagaacagtgttcacccagtcaccccaagatgccctctttcatcctgcagtcctcagcaaattggagccactgccctacattgccctgttgtcctgctctaaggagcagaattttgaagaatcttggagggcggggtggcctcattgtagcagtggcctaattccttggtgtgccaggtaataatagcacgccgtggggggaatctcactcagcatgctgtccgaggggaaactgggccatggaacaatgtggcagccccactcaaggtgacctagtaactgagggcacggacacacgattttccaggccccagttccagatccaggctctagaactcttcagtggtctcctgggccagtcctttgggccaccaggcaaccaggtcactcaaatccaatcaactctccatccactaataatacaaaaggaaatgtgggatcttaagagcaagttaagaaaacaaagtgaatcagcactgtgggggattttggattcaggacaaacaaaacctgagagccagcgttggttttcttttagataatgacttgcacggaaagaggtggacctcagtgtctccatctttgaaatgggggaacactgagttatttagcaaccatttattgagggagtgcctgatgtgggcctggctcctacagtagggctgattagggctcctacagtaggccctggagttacaaagagtggttcaaggtaaaagcaaggtcaagatacatttacaagccagtgtgttgtctgtacgtggcagccctataaggactggggttctgtgtggtcctagagatttcggtcctggagatgaaagactgtgagtatttacctggaatggaggcccagggaggaatgaatttccctactcctgtgagagctgtatgtaaatagactgtttctgtgttggaaagagcacaggcagagtctgtgactttaggcaaactgcctaatttcttttcaactgctaaatgtgaataagcacagcaccaacctcctaggtctattgtgaagattaaatgacataacctagtgtggtcttagcgtgttgtaggcactctacacactctatcgttagtagtagtcatattaatattaaactagcaaaaactgtttgcccaagaagttccagtaaatcattcccttcaatcagggtgatgataattttattttttagtattattaagtcattgctgtctgtaaggccatcaaagagctggagccacttgctggaatcaggctaggtcaatttctgaatgctggaatgaggttgaggggagtgaggtagaggatacatttttaaaaagtttacatgtaatcaaaccctggtcattcacatctcctgttagattcattatgggagttggatatttaagaggaatctttgccacaaattcatgtgtaaacccaataattctcgactgttaaaagtggtgggagccctagatattaggatatagggtcatttaaccccgtggttctcaaccaggcatgattttgcctcccatgagacattggcaaattggggtgggtgctgctggcatccggtgcgtagcggccagggacactgctcatcttataatacacaggataaccctcctcaataaagagtaatctggaccaaaatgtcaacagtgccggggttgagaaactctgtcctaacctgaagatgagacaactgaccaccaggaagggggagtgacttgctgaggttaggcagcacagctgcaccagagctgggatccaaagtttgaatcaattgaccagaggccagaggccagacagaaccttgatactgtcatctcacctgtgaagtaaattatcaacctcacccatgtgaatgaggccttactctatagtattttcaaggctctttctcttgtgatattaagctctgctttggaaaaaccaggttttcctattctgggcttgctgatagagtaaggatggtagattcagcaaatgaaaataaggttgtccaggccaggcgcggtggctcacgcctgtaatcccagcactttgggaggctgaggcaggcggatcacctgaggtcaggagttcgaggtcaacctggtcaatgtggtgaaaccctgtctctactaaaaatacaaacaaaattagccgggtatggtagcgggtgcctgtaattccagctaccagggagactaaggcaggagaattgcttgaacctgggaggcagaggttgcagtcagccaagatcgtgccactccactccagcctgggcgacaagagtgagactccatctcaaaaaaaataaataaataataaaaaataaataaataaaaagaaaataaggttgtccagttacatttgaatttcagataagcaagataggtttttggtttttagtttttagtttaagtatgccctatgcaatatttgagacatacttatgctaaaaaattatttcttgtttattctgaatttcaaatgtaactggcaccctatcttttgtctgtcagccctgtgagctctacccatcgccctgagatcacaggtaggccctggggtcatctacccctgtctgaggctcctgcaacccttatgaccccctctgcctagagggggaagatgggaaggggcaggtgggccttgagtggagcaggcattcctagctcctggcctgtgggtgcctgggaagagccggctagccacactgggctaaagggcctgtaagttgagaggttggccaaactgtccctttttataacaggagaatggtttaaatgaagtgtcagcaggtgacctatggccctggaaaaccaagtctggagaagttgtggcaactttgcccctgattggggaacagagtgtcctctgcacttctactggtttccagagaacatggctgccctggctgaggagcacttggacatggtaccttccagggctgaggtgctgtctcctcgtcacccctgggctctgggcctgccccaggggccagagttgggcggttgttcctaatacagggggaaatgatgggcagggctgtgcacccacagagctgctgctgagccggcagctcagcctttttgtttagaagaggcctagatgtggagcctatcaacagatcagaaggggatgctggctcagctgctccctcaccttgccttatcccacacccctttcacctttgcttccttaccagcccagacaccaggctccaaaccagtcagtgctcagggtccggcagccaatggcacaaggtgggtggcccactgccctgccccattccctccgcctcccaatccatggtccaggctgttgctcccaggtgtcaggatgccatcccccttccccagagcagcttcctgctaggaaatctcatcctcacagctcctcctaaagggcagtcagctggccacagccacaacttggtggcctttcttcctgttggctcagaacagcctttgagggtctttgggagtaactgcttagggactcaccatgttgtctgccatcttgtcgacatcgttgggccacctaatgaccagggctggctccacctggcctttgctgcatgggtgcttattaataggcatatattgaatgaatatatgcctatattcacagagttgaggacagttaacccatattgcagaaggtgtctgatgataaaggctgaatgaagtcattggttctcaaacttgagtgggcattagcatcacctggatggccttgttaaaacgcacagtaccagcccaacctggggactcctgactttgtagttctggggtagggacaactttgcatttcttacacatccccaggtgatgttgcaggtccagggccatctctgaggaccactggcttaagctggtgcccttctcaaaatgtcttgcatttccattttacttttattaaaatattccttaattaacaatttttaaaaatcttcattgactacttactctgtcccatgcacgaaattttggggataaaaagagaaaaattgcctcaaggaactcacagtacagtgagagaattgcccatgacaaacaatgaccatttaatctaattacttttattgggatattgtgttgaaggtgcaatgggggtgtggtaaggggaatgtgcagtgttgttgggggtatccctttgagggcaagtgtgatagtgtctctctctctcttttgtattgcacttctctctctttctgtgtattgcaccaaaagtatatactttttgaagaagtatacacttctttttgtgtattacacttctgtgtggcttgttttccccagttgacttgcgagatttctaaggggagaggctgaggtgaatcttggtcttcttcatttaagtgtgttccagttgacataccaggcaaccaaaaaaaaatgtattacctacagaaaagaagttcatatcaaagaagtgaatgcctaatggtggaatttcagggccaagtctgtgtgggggtttactcatctagattctactatatgtgttgagttctagggctgagctggatggagagaaagttaggcaggacggtacctttcctggttcctaccatcaacatcgctgactgagtttatggggaacactgctggtatttcatcctgcagggattcttgaaacctgccatgagctaagacagctcattttcaagagctttaagtggtcctgagcggatgcttagctggggacttgtcatggcctgaggtgacataccctttctgcagagggagaaggcctctgaacctttctttcttcagaacctgggggactagggaggaagggaaacccctccatgacttgcctgcttggggctaggagctggaaatggagacagaggaagctgcttcttattatgcacagggccaggagaaacccttgggctttgcccggggccagggctggcttccctgtgactttctctccacacaccctctcatcctccctggcttcaggagtgacagatagaagcagaactaagccggctgtacccatcattaataacagaaatattcaggatagctcattctcatggagagctcactgttctttgaaaataccttagattcacgaacagattgaaaagggtcaagagaggttaagaacagccaatatttatagagcttgtgctctcagccacaatttcaaagtgttctgtgtgcattacttcattgaatctttagaacaaccctggaaagtggggtataattggctccattttaaagaaaacaatacctcagctatgcagtttgagtaatggtcccgagatcactccaaaaggaaaagtgtagcaccagatttggaatcaaacaggaagactccagagcctaagttcattctctgcggtcctgctctacttggtggtggggaaggggagggaggagatgaggtgaggttgaggaaagaatacttcagtgtgtgcttaatctgcctcctcctgcaccctgccctcctcctgaaggtctgtcctggccacggcagcctacattatgtcctctttccagcttctgttttgacctggtattgacatttgacttggcatggcttatcattatctctatcttgttaggattgcaacaccctagtgagcagggaatggcctccagctccctcaggctctcctaggataccttacagcagaggtcagggtagggctgataaacacttatagttgcccagagcccggtacctggtccacagctagggtgaccaaacattctagtgtgtttcagttttggcactaaactctggcattctgggaggccccacaatactggttggtcaccctatatctcatttgacaagcaaggacattggtccttgggggacacagtgtggtcccagtctcacccatggttattggtggaggctgatcccaaggcctgctctctgaccctgatccagttccctctcctcctgctgctttagaagtgagggctcagtctcctgctcttgcttgttaggtcaaaagcttttagagacagccactgtcttctctatgggctctgagatgcttcttattctcttttggagaaaagacccccacagtcaagaagctttggctgagccatccttacttacagagcttgtgctgggcaagtcttggagggtcagcctgtgttctctaggggcttgctaacagaaaggaaacggcttttcctcgaaccacagagcacagcaactcttcagacacgctcggtcagcctgcaggggcagggggtggttgccaaattctaatgatcagaaattagaaacgggaacagtgaattctagaccagcagcctccaaagtgggatgcacaaaactatcctttggaataggggaagaaaatgttaagacatctatttctatttacgtttatcactctttaaaatgattacatctgtgtgcactttattgcgtatgtaatatgagcaccatatggtgcatgatgggcatacaaatacacacgtgggagtggacactgatgggggttgctcattcagaagtgctccctatgtctccacagctgtattttaatgatcatgaggtgggctggctggaagatggtcactttcagcagaggaggttcagaagaaggagagagtgagtcttagagtaaattggcttagaacatcccttagttgatgtttaatgcagatgatgcttaagtgtttctggatggtgtgtgatttcttggagcgattttgtgcatcaggaagtgaacttcctgcagccacattttgcacatcttgttccattacttgtctaacaggatgctcacattagcttgtgggtgacaagaggcaggctagacagagcagaggttctcaaagtggagttttcatatcagcagtaagagcctcacttgggaagttgttggcgatgcagattcttaggcttgctttcagccccactgacttagcgactctttgggtggggcccagcatgtcttgtttggaccatttgtccaggtgatgctgatgataggcaagattgagaaccatggagatacacaggcaggggcacacagtttgaatcctggttctgctcctgctgcttctgtggcctgggacaagtgactgatggcccagagccttgatttccccatctgacaaatgagagtgataacacctctctcctggcattagtatgaggattaaaataggagacaactgatgtaaagtgcttagcactgtgcagagcacaaggagttactgcatatctagcctcagttgtgatttttaccattaattggattatgatgggggacggcaacttctataaggaggtggcacagaaatgtctgatttctccttccttctttcagtagctctgtgaccttgggcacatcattttccttgcctataagatgtagataacgacacccacgtaacgggataagtgaatggaggtgcctgcagtgctttgcactttgtaaaacaccaactgaataggagaagtttctagagagctctttactgaggctgcttctactttgtcctttctggaaaatacttcccctctgcccaaatagtaaatgagagaggagaaaaaagccagaaatcccacggtgccagacttgcaggcacaaagagcctttgcaccgtaggtgactttgtttcctgagtgccatttttggcccctcccaccctggtcctcctagatcctggcctcagcttacttcccctgtggttccatgttgattccttattaaaatgtcacctgcaagtcatgaaaactcagtgtggtttcctgaaagaggaggggcagtgattgtccagagtgttcttttgtcacgatgagaattgcttgggcgacagtgtcaagacagcaaataaattgcctcctccccttcaatgtctcagtgctgtttttgcagcatgaatggttccagtgtggagataatccttgctcatcttttcaccaggttcttgaatgtggaaaatgggcaaacagttctccctcaccacacactcctgttatttccagtgtcccgtggccatacacccatcagcagagaggcctggagtggcaagcaggggtggctggaagtctgctctcttctcatgagagtactgagggcccagtgaggtgtctgtagagcaagatagagccaggtgatcggggaagagagccctccaccccagttttcccaggaggcgacaggccccatctctggggggagtggcgcatgcctttctcctcgtcacctgccccgatgagccccacatggatgaagtgagagcctgtgtcaccaccccggctcctcaggaggctggtgatgaatagggatggcaggaaaaaggagctgggctctgctgtgacatgtctctatttttccagaaaactgccggatgtccttcccttgtaaaagttgaagagaacagaggagaggagaagggtcggagcagagagatttctgatatgctgttagtggcgctgccaattaaaaagaaattaaaacagaaatctccgtgggctgctggagtgaaaaagtctcctctcctggcccctctaaacccttgaacaaattaattggttggatgttgactgggtaccagtgaaattcttagatattaggtcttgttctatggtaggcacagaagaacaaggggtgtgtgtgtgtgtgtgtgtgtgtgtgtgtgtgtgtgtgtgtgtgtgtgtatgtgagagagagagagagaagagaggaaggatgggggagagaagaagggaaggagggagaaagggaaggaggaaaggagggaaggagagcaagagagagacttgggggcatcggggtgggttggagcagttcagggattgaaatcatgctgcatgacatttgggcattttggggtagctgagacaaaaactgctggaatttcattttgaagataagaaaaggactaggaaagagagcttctttaggccagaggagaacagattgaggctgtgaaggactcttggctcccagctcttcttgttctctgtggactttcaagcttctgcagggagacagtgaactgggaggaatatgtagtgactgtgaaggttacatgtggctggaaggggcaggcaaaaggtcccaaatggccctgtggtgctttagttggcagagagatggacaagttgatcctgcccttatgccgtctcatgcatttgtccaaaagctttgtttctgctgcgtggtcagagacagaaggaggaggctgcctccccttcctgggacctggatgttttggttcatctgggttcctttctgattttgtgatgccctaagcctcctgtccccacagcccttctttcctttttgtagattctcttgcaaacttacaaagtgtctgtaacctttggccctgggacccagcatgagcagcttactggagtcaggacagatgcacgtgggtgctgagcagagccctgtggagcctcggcctctggcctccttggccagctgctgccctgtcccagggacagtgtggcttcccagggagcacttcactccaatctctgagccataaaaaattaaactacagggctatcaaatatttaatctgcctgaataatgaacatgggcagattcttatgaattctttgctttgattaaataaaattgaaggatgggaactgtctgcttggcacgttagctgaaggcaatgcagggtaggcactttgtgccagggatctggccctgagtctggaagaaccatttggttcatgtttcctcacccactgtctatacttcagttgtggatagccctctggtctttattcttcttacctgtaaaatggggataataatgataatactacctcacttacaagattaacgtatgagatttatatcaaaagcctagtacctggcacctgttagtttctttctttttttttttttttttgagacagagtctctctctgttgcccaggctacagtgcagtggtgcgatctcggctcactgcaagctctgcctccagggttcacgccattctcctgtctcagcctcccaagtagctgggactacaggggcctgccaccatgcccagctaatttttctatatttttagtagagatgggctttcactgtgttcaccaggatggtctcgatctcctgaccttgtgatccgcccgtctcggcctcccaaagtgctgggattataggcgtgagccatcgtgcctggccaggcacctgttagtttctaaacaattgttaatatcattcattactttatttctaaaacagcatgattgaattgagcatttccttggacttggaaaggtatgattttggaggagggtgaacctgtgtaggctgttgcagggagttccttgacattatcaactgaccagtccatcaacaaatttatttgttcatttatttattaattcaaggatgttgggtccatttttcagttagactctggaaagataagtgattggtcctatcccttaagggaaatatgctttcattggagaaataacatgtacacgctgtgtgtatgtgtgtgtgtgcacgcgtgtgtatgtgcatacacatgtgtatcttttttttttttttgagatggagtctcactctgttgcccaggctggagtgcagtggcatgatctcagctcactggaacctcccccttccaggttcgagattctcctgccttagcctcccaagtagctgggattacaggcgcccgccactacctccggctattttttttttttttttgtatttttagtagagacaggatttcaccatgttggccaggctggtctcgaactcctgacctcaggtgatctgcccacctccgcctcccaaagtgctgggattacaggtgtgagccaccgtgcccggctgcacgtgtgtgtctttatgtgttcaccctatggggagagaaaaggttcatgaaagttgagattactgtgggtagggttgtcagggagggctttgccgggagggggaagctgcgctaggcaagctgtggctccagagtcttggaggcgcctgtaacagtccctgcggtttcaaaagaattcagagaggggagccatagcctggtctccaaatgtgcagcaccttctgggcaagcttagacttaaaggatatcattgtagataatgatttgcttatttcttgctctaggatatggggactgtttctttttttctgggatgctttaataggatagtaaaagtaaacgtgtccctgtctgatggcccttggctcagctggaagaagatcagctctgctgcaatttaggaagagataactggggtccatcacgtggctggttcagaccagggttttatgactgggatttgcctgctggagccctgggtcactgtgccagactcaaccacaggtcacaatctggaactggatccttgctgccagatgggaggcgggcagggccagccctatgctgtcattggcctgtagccagctcaggtctggtggcaagtgaaggacacatcctgatgtctgagtgccctgcaatttattggcttgtggtttaggggtgtgggggacaaacaccaatgccacagttgacatatatgggcgtcgtatttggtggggtcaagagtccggagggaggcgcatccagcttctgtcttggctgcaggccaggtctgcccatgagacggttctcctccttaacctattcaatccaataatcgatgagcaggtattttctgagatctgaagtgtcaagtactgaagacatcaccaggcttggctccgtgggacacacaaggaattataaagcaggaccccctcatccccctcaggagctaacagtccaattgagggaagcaagagagacagacgcacgtgaaaggttaaacaacttgtcctagcctgaaagacaagacccgtgggaaacaattcaggaaatgtcaccaggcagcatcttcttagtgctgcaaagatctggaggaacgaatgaccagccggggcacaggggcgagggcttaggcttctggggtccggttacaaactgtgacaccttggccacctgggtttacctgtgtgagtcctggtctctatatccctcagatgggcacagtaagacctgcctcagagacatggggaggatttaatgagacaatgtgtatagcacattgcctgacgaaggggaaaaacctcactgtgatagttaatttattgtcattggctgcaggggccagagagtctttggggaggctctgctggtaaaggctgagcctagccttgtattgctcatcttttggataaggtaaggatggaacctttgtgaagaggaagactggacacctcctgccccctcccactgtggtttgagtggattttatcccgcatctgttgtttgcctggcattggatggccctccacaccagagagctaatgcctgccttcatcactagtgtctctgtctctttgtttcatcagcttctttatgtgaaaagagagaaatgatctctgtctctttccaaatcccagcaaggctgaataatatctgtggatattcttttctatttcttaataccctcgcattgcttatgaaaatcctatgggcacattgtaaattatctgcaaaaaacagcagagtgcaaagaagcagaaataaaacctcccataatcacaacagaaacatctactactgttcatgattcgttttattttcccccaaatatattactgtgcatttttctttataatgccgagatcctagaatatgtgcgatttagtgttctgcttttcttcttaacattacgttatcagcatttccaagtgacactgggactctataaacatattttaaatgactatatcttatatggatgctcactccttttccttatatttgctctttactttttcctcttttttgctattataaatagcattgtactgaaatccttctgcagggttatgtacattacctcattggtttatttatttaacagactttgagtatctacaatgtgcaatacaatgtgcttttagttctgagaggaaaccatctgaaatagcaaaaagagacataaatgaaatacctcacatgtagagttttgtgatactcttttttatagtaagtatacctggcttggagtaacactgtgggccggttaattgttctgggcctgaatttctgcatctttagtcactagatggtttctaagctgcctcttgtctccagcactctgtggtcctgactgcaaatgtaagaatcaccgtagcattcatctatccttgtgactcactagggctgtttgtgtttggagcattcctggtgcacagatgatgtgttgatggacttggacacagtctgttctcttcccctctcagtcatgagcagagcgttcatctgctcagtgcttctttttaataagtagttcaggggttgactgcagctcagctctgttgggaattaacacagacataatagacttttataaaagtgtgagcagagcaactaagccagtacagactctttgccacatcctgacatgctaagagagaggtcccctttaaaacgcaagcagggtaaatattagaaaaatggcaagaattcatagagcataaagctcataataaactcagagaatgcattgtcctgagaagtggtaaaggaaggaagtggaatagacttcaacaaaatggcatagaattaacggcagagggtatcatgtacctgcagggtatttgaaccgggtgattttgtgtggcagtgcccgggatccacagaccctaatgacacccaaatttgtgaggcattcttctcagtttataaagaacatgactgagaccacctagcacatttaaccgggtctgaaggaccagctaatttcctaaaaatagcagtttcttgctgggcatatgtcttaggctttgctggctctaagaacttaatattaacaattcacacagaaggaatcgtgttcagggcattgaccaatactcagctcacctttgaatggccagaggacacagctctaaagaaaggtgtgcaacaaggagtgtggttgagtgggcatgttatcttcctaggtcacaagtaacaaagtgccactccccaactccatattcataacagacatccataatctatcaggatgttctttctagccaagccaagatgcaacttcaggatcttttttaacacagtgctccaggcagccactaccacacagatggggttcatttgctcctggaataaaaccttgtcatccctagacatagaggcagtctttcccctgtgagccacagcatatgagaaaatgtcaccatctagaaggttccttggtaagcacagacatatggtggcctgataaattgcctttctctacccttgggatctttgtccaaggaactaggtgccatcttgagtcagactggcaagtgtgggaaaatagaattcttattcctatcagccaacagaatcttcagtgtttcgtgttatgataaggagttacactgcagacatttctcagagggtctgttcctgtgttttatcatgttttccatggcaacccctgtgggatccacgaagttggtattatctccatggcacagatgatggaggcccaaggaagacaaatgaccggcaggaggcaagtcatgcagctaagagcttttcctggaatccaggtgtcctgccttcagatgccagttctcttgctggttttcgtttttgtttttctaaaaatgttttcacctgtcaagtatgtgctactatgaattctgggagggtagggtcgtgtcttatttatttctgtgtttttgactgcttttcctctccaatctcaagtgctgtgactaacacataggaagtactcaagaaaatatttatggcatataagtcagtagaaaatccattcattcattcattcatggaagaaacaaggaggtgccccgacctcttttgcatgctggcctttccaagtctgcactgggattgtgccctgagctttcatcataagagcagggttctggctgtgaggcttacctgggcacatgcacctgagcagcagacgatgacattatcagtccactggagacattttcttcctcataaaaaggctagtcattaaatccttatttgcagcctgtgacagcaggagccaaaagcctctgacccgctcaggacctggggttagagctgcatggaccctgaagagagggatccctgtgctaaggccttcggacagtggccctgaccgagcagcagagggaagagggcttagggagcgggaagcaccaatgctgggcttgcaaagggcagagcagcaggagagaggctggcataggagggaggagggctcacaggagtgggaggtggattggatttagggccatcaggaggggtgggaggccaaacagctcagctccccagtccctttctggggccatctttgttttctgatttataatgtgtcccctttgcggatggccttttgacatgtgctaattataaattgtcctttggtgcattccgagagttctaataattagaatttctaattccagtcctctgagctgctcccagcagcctcatcctgtgagaggagcttgactcatttgctctcctgctcaaagtcgctggaggaggccagcaccgtgcggcctggaggaagtatccaggtttgggggtacgggtggaacttctttctgcaacccaatacagataacccagaagacccttctctttgtggttgtggtttgtgttgaagaggaagattttgaagtcaaattgacagggcaggatggtctatgaaaaagaaccctggactctggttttagtccagccagagcctcactgtgagaccctgagcaaggagatctttagacctcagtttccttggcataaatccaaaggaatcagatctgtgattgccaagggcccttccagttctgagattatttgaatctgtgaaatgtgcatatggcgtgttctgggtggaagtcctcaggtcatgttttgaccctgcttgtactggctacaggactttgtttgcaggccatgtgataacaagatattaagtgactttgttaaaggtcaaagtaagaacccaagccttgtgcttttttttacactgccttattttcatcattaatctccccttgccttggtttcttcatctgtaaaatgggaataataatacctgggagattgtattggtgaaagctctatgtaaaatgcagaccactaagcgtgtgtaaggatcttaatttcacttctagcctttgggagatgcaagttacgatttctcccctgcctccttcagcacgaaaccacaatcctaaagcatctttaggactgtatagtaatgtggcacctaggtttgtggtggggagaagacaggcactccggccccaactctgaagacccaccttgccttgcccagggagttgccccttggggaatctgataaatgtagatgtcagtcttgagaagccactgggcacccacctgtccttgtcctctttcgtaatggtgagcatgcttggcatagtgtagactttcactggtacacaacacgtgcactcctattatctcatttacagatgcccgggagggggacaagttgaggcacttagcaaatagagcagctgggacaggaacgaaagctcctagctccaggaaagagtcaagcagcctcctgacatcacccacacctctgtgtgctccttctgcagttgtcccactctgtcctccagggcttctcccttctaggctcatgatctgaggctgccccttgctacccaggggcaaaattgttagtcctggaaggctctttaaaggtcattgtgggccaggtgtttcagttaactgatgataggatgggggccaacataattgaatagttcccaagactgagcagcttgctcaggtagcctggctaaacccaccagctctcccggccaggccaatgtcctttctctgacaccctattgcttttctttccttacattctctcagggagtcatatacaatgacagagaagtccagggctctgtgttgtttggctgtccagtctttgggagagagagaaaaaaaaaagaatgtggaacctccagacagggcacaccctaccgcgccccatgtgagtttcctgaggtgctgtaacaaaggaccatcgcctgggtggctcacacaaccgacagttaccttctcaccctgctagaggctgtaagtctgaggtcaaggtgccagcaggattggtttcctccgaggcctctctccttggctcttgtagatggccgccttgttttccctgtatcttcacatggtcttttttctgtccatgtcctaatctcctgttcttataaagacatcagtcctgttggatgaaggcccaccctaatgacctcatttaaccataatcacctgttcaaagaccctgtcaccaagtacagccacattctgaggtcctggggattaggatatgaacatgtggatttgcagggaaccaattcagtccgtaacactctctctcacatcatgccgtgtgtgatttacatgtctttgctgtgtgtctggctcttgtagactttgcgttttcacccctgtcttcctgttggaagtcttggtgaatgatcaagggagaatgtaggccccagaatggaaggagtgtctcagggacattagagagagggaagcagagagactgcccacccacccttcatcattgtgactgctctaaggaccggccctgggtgaggcggaggaggagcgcacctgttcagaacgcagcgaggctgagcggggagctagctggcagtccttctagggagtgtagctgattaaaataattatattaactggccctcaaagagacttatttatagccatggtgacacgttattaaggatctaatttggatcaggactctgggaatcttatttttaggcccagaagagagccctgcaggcaggtgaccaggaggtctcagatggctgtgtattcactctgtcgagtcagggattctcaaggtgggaggcaattggaaaggtcgcactggcccacccttcccccgatgtctgtccccctgctccagtgtcccactgagagaccatccacctcttcttaaatgcctcctgtgccagggagcctgtttccatccacggaggcccctcctatcttgtgaaagtcaggctctactgaaaagcaagagagagatttctctctaaatcttctgtctggtggttctggtctccccctggggatggacagaatacatctgaccactgggccactctcttcaggcccttgaagacagggctaaagctcttcttggcctccactgctccaggctggggcccccagttcatcagcccccctcaggagataattgcaagagccttcactgctccgtttctcagaggatgtgagtgttcagttctgcggtccagcaactcctccaatgcctgcctcctggggatagctgtaattctgggttgagatgaaagttggccagttgaagtcaactggcctttggttgagggcctatggtgaaaacagacttcatctaaaaagaactcagtcagcaggcacctgcactttggaatcagggaggagaaagatggagactaggaactgacagaagggttttcctcgtgtgaagggcagcaccaggccatgaggtgacccagggcaggccacagccgtggagggttagggtacagcaccctggtgggtggccccgctgggaagtgcacatttgggttttggtttgccaaactcaccctgcccaatcctagtacgagcccaccatgaatgtcagacagcatagagtaagtgcacctggagcccatcctgagcccttgagctaatgtcttcactcctctgatctctgggttccacctgcctcctttgttgtttgaagggtggaacggactgatgcctatgaataaacacaagctccagcgctctccacagatgtcacagatgaaagactaaaagctgcttctgcacgcacagatatttatattgtagtgccaaacaacaacagaataaaaagaaataatttttagatgtgggaaaatcagactctagaagatgttttataggagctatcatggtaggatggggctaattttccaaatgcctattttcctctgcttccttttaaagttctctctctttttatttttttattaaagcaaggaaataaacagtatgtgtgtgtggtgtgtgtatgtgtatgtgtgatgtgtgtttagtatgtatgctctctgtgtgtgtgtgatgtgtgtgtgacgtgcatagtgtgcctaggtgtgctatgtgtatgtgtctgtgtctgtgatgtttgtatagtgtgtgtgtagtatgtgtgtgtggtgtgtgtatgtgtatatgtgatgtgtgtttagtatgtacgctctctgtgtgtgtgtgatgtgtgtgtgacatgtgcatagtgtgcctaggtgtgctatgtgtatgtgtctgtgtctatgtgatgtatgtatagtgtgtgtgtagtgtgtgtgtgtgtggtgtatttgtgtggtgtgtatgtgggcagtgaatatataatatatgtgtgatatgtgtggtatgtagtgtgtgcagaatgcgtggtgtgtgggtatttatgtggtgtgtgtgtgtggtatgtgtatggtgcatgtgtgtatgtggtacatgtatgtgaatatgtgtcatgtgtgtggtgtgtggtgtatgtgtgtgtggtgtgtgtatgtggcattatgtgtgtgtgatgtgtagtgtgtggtgtatgtatggtgtatgtggtgtgtatatatatatggtgtgtgtatagtgtgtgtataccacttgtatgtttatgtgtgtgtatatatgtgtgatgtgtgtatagtgtgtacatgcgttgtgtataatgtgtgtatagtatgtgtgtgctgcgtgtatatttgttgggtgtgtgtatatgtgtggtatgtacgtggatggtgtgtggacaatgcgtgtatgtgtgttatgtgtgtatgtgtgatatgtgtatataatgtgtatgtgtgtatagtgtgtgtggtgtgtgtgtgtagtgtgtgatgtgtctatatgtgttgggtgtgtattatgtatgtatatgtatagtgtgtgtggtgtgtgtgtgtgacctgtggtatttggtatggagtgtgtgcagtgtatggtgtgtgtgtagtgtgtgctgtgtgtatgtgtatggtgtgtggtgtatggtgtgaagtgtgtgtgtagcatgtattgtgttacgtgtgtggtgcatggtgtgtgtgtagtgtgagttgcattgtgtgtggtgcttggtgtgtgtatgtgtgatgtgtgttatgtggtgtgtgtggtaagtagtgtgtgttgtgttacatgtgttgtgttgtgtgtgtagtgtgagttgtgtgtggtgtgcactgtgtagtgtgtgttgtgttacatgtgtggtgtgtattgtgtgttgtatgtgcgttgtgtgtgtagtgtgagttgtgttatgtgtgtaatgtgtgttgtgtagtgtgtgttgcatgtgtggtgtgtattgtgtgttgtgtgtggtgtgtgtgtagtgtgagttgttatgtgtgtggtgtgtagtgtgagttatgtaacatgtctggtgtgtattgtgtgttgtatatgtgttgtgtgtgtagtatgagttgtgttatgtatgtggtgtgcagtgtgtagtgtgtgttgtgttacatgtgtgttgtgtggtgtgtgtatggtgtgcgtctatccattggatgagccgggctgcctctctgagggcaggaggccctcttgcctgcttcattccccaccccggttttctcctcactgcctcagctggcatagttgtgcttgatttagctcaaggaacaaagtaagagaatccaagtttttggacaaaacaaatgcctagaaattgtgcttctaaagaagtagtttttgatggctcttgtagagaaaccctggttgcttgaaatgaggtgagagtttcccaagttagaccccagtaagatggcggagcctgcacacaggctttaaaaatgattaaattactcgttcagtatgatcaggattatggtcaagtgccttctttctgctcttctgtctgacttgcagctaaaaataaaagtcaggaattagattcttctttttcttctccactgaagagcaccctttgtggtcgctggcgctggttaggaggagatcccctgcccagagccctcatgtggggacaggatcttccggcagcactgggtgttcaaggtagggtgccgggcctttggtttacatttctggatgaagctcttctgctgccctaccctccctctgtctgaggccacccggagtcttccctttgcggcacacagtaagcagctttagtgacacgtttccgggcctcacctcctcagtttgctgagtctccattacatctgtggcaccgtttaagcagcccataatcatttgtggggtaaattaatacagtacatgtctcaggccctcccccaggattggcatagggaactgagaattccacctgtttccctttcctggatccttgcagttggtgaccagtggagaagatggccctggggtttcctcctcagccccaaattcctacatccctccaaaagaacctcagagagcaaaggcagccggacgcatccgaccctggcctccttctcaccactgctgacagaaggagcagaatcttggcagcattgttaggtcttcatctgctattagctgattaaaaagttaaaaaaaaaaatctgtatccctgggtagcccagcctgttccttgctgcagttgaagactgaccgaggagctatcagcggcttcccggccactgtggtgccatttttggcctcaaacccattgtgaattgctatcttttcccccagccatcagccggaagatccattaacaaattaaaattccctctagagtcagaatggctttggtttctgggttctaaatgaccttgattttaattaccatgccatacaggtttggaagaagacaccatcactgaatccctggctccttgctgaggcagcagagagctggggtattcagtttggccacacttctgggcttgtgggtgatacctctgaagtccttattggtttctaaaggtctttgtgccactcccagtttctcagtcagctgccagtgagttcacacacctctgagaactcttccaggacccccagtaagcttgctctaggccccaaggagtcccctctggcaaccgttatattcagggacccttctcaagacaaatttcttgaggagacacagttctggcgctgccctctaaacgctgtgttttccttaggtggccaggcaaactgtccagagtggtgtctgctcttcacctcatcttgaaggtggacgtcttgaccagaaatcctccttctccaataaactggaaggagaggcttctaatttctgtaatgtggggacttggatggcgtgtggatctctaactgcatcctaagttgtctaatattgataaaccaaggagtagcggggttcctattgtggcctttgaaggtattgggtggagagaacacaggatgggcaggcgggtcctacaacagtcagcaaagtacatggctagagcaaaagaaaccttatgcaagtgcagatttgggactcaaaccattcaaccttaaggtgcttggggcgaagtggtcggggagggtggtggggattgtgaagtgtgtgacttgtctgcagaatttactgttctctgctttcattataagcctcttttctcacacagaagagtaagatgaagcatgcagagaccaggttgggttaagactctgtactaatcacaagtagtgcaagaaacatttgctggacacctactgagtgctgggaactgggtactcaacacatctctgtgaggaagggactattatcatttctattttcttgatgaggaaagggaggcactgtattagtttgctaggcctgctgtgacaaagtactacaggccaggtggcttacacaacagaaattaattttcttacagttctagaggccagaagtctgagatcaaggtgttggcagggctggttccttctctgggttgtgaaggaaggatcggttccaggactctctcattgccttgtggaagactgccttcttctccctgtgtatgtatcatctccctcctgtatatgtctgtgtcctaatttcctcttcttctaaggacaccagtcatattgcattaggacccaccctaatgacctcattttaattttatcacatctttgaataccctgtctctgaatacatcccattctgaggtactgggcattaggacttcaatgtgaatttttggtggggaacataaatcagcccttaataggcacagaggggctaagtaacttgtgtgtagacacagagctataggagaagatggcaggcattctgactccagaatcccctggttctgacagaatcccctgacagttctgacagttcgagaccagcccggcccacatggtgaaaccctgtctctaccaaaaatacaaaaattagccaggcatggttgtgcacatctgtagtcccagctacttgggaggctgaggcacaagaatcactggaacccgggaggcggagtctgcaataagccaagatcgcaccactgcactccagcctgggcgacagagtgagactctgtgtcaaaaaatttaaaaataaataaaaataaaaataaaaacaaggaaacaatatgattgtactattcaaaggataatacttaatttgcaaacttcatattaattcctagtgtactaccagaatgagatctggtaacaggataaaagtttaaatcagatgatcaatgccatattttttccttccatgaatacatctccaggaatgtgtacataacctaatcaggaatagcttcaaggtcaaaattcgtggtccctgtgaatgtagaactcggcgagtggccaagtggccctgctgtgcctccctgcccttttggagcagcctttcagaaacttctggactctctgaccactgtcctctctcaagtctggaaacttgggaactaaccttgacctcgagttggctttccctaggggcaaatgcaggcgctggtggaaaaggctatggcctttatagtctctggcagctctgtgtgtccacacaactgtgatgctgtgacatagagttctgccactggattctatgactgaggatgaagtccaactaaattgccatgtctggaaccctgttggatcatcgcactggcaccctggagtcccttgggatcccctattcgctcagcattacatctgctgagcactgctcagtcaacattagtgaagacaactgcttcggagacggactttccatcatcaaaaaatgcaaccaacagagagcttgattaaagtgtagttatttggtgtgaaacatgtcctgccaacagtgtggcagtacagacatgaattaagatgaaaactgacacagtcactgagtctcagcctctgagaagcagctgcaatgtaagagtttttttaaaaactggtgaatctataaggccaagagccaggagaggtgatggtgcacatcaaatggaggtggcaatggctttatgacatggtgcccttcacagtctggcctagaagtcaccttaagatcacaggctaggctctgcgttcctctagctagatttttcctagcacaggggtctggctttcttttttcttttctctactttttctttttttccttctcctcttccttttcctctcctcccctttcccccctccctcccttttttctttctttcaggtcctgtctatctgattgcaacttcactgcctctagggctttcaaatcaaaggtgataacctgcctccctcatggacatcagcatcccacgtgacagaacaggcaagccctcagttctgtgaagggtggtcacagcagacggaaatgtcctgcacaggaggcttgtttgctcatattctcccctccttacctttctggctccttactctctcactagagctacattcagcctgtctcttgcatcagtctttctgtgactattgaagccttcaatggttgattatataatgcagtgaactcatttcttgtagttgattacaatttaacatatatgtaatatgtagtatttgtttgtgtacttgattggcctttgtctctcactagagaataagctctttgaggacaggaatcctttctgcctatttcactattgcactccagagctcatgcagtaggttctcaatgcatgtttgttgaaagactgagtgagcatcgtttgggctctctaaccatcctctgagatacatgggtggctgtgtcaattgggctttggagatgaagaagcagctagccagcagatgatgcaggcctgggctttcttagcacagtgtgtttggctcaagaggaccacagtgatatcagttactcccctgcccacagggagcttgctctctagttagggagaccaggcgaagtgagggagagtgggtgtggagagtccatgctaggcactgaggatcgaggagtgagggcagccaggcttcagaggggcagagaggtctgggccaggaagaggtggatgcagccctgggcctcatggtctatttttgccttagttcctgatgctcccgccaagggtatgcccttgctgggcatcctacttcctgcccactgagctcctgccaggaacactttcttgggatggtcccattttctgccaagggtggatttggatctcttctttccctcttagcatcccatgggtgtctccataggctgaggcaggttgtggactgcccagccccgggaagcgtcacacatctagaccaccatatgggcagtgcctcctgaagctgtgcaatggagcagccttgggctgaaggatggaattgggaatctggcttggactggttcaccctcttaatgtaatgtataaaggaagagaatattcctagggagaggctacccctcgaccagtttttctagtctatgttggagggagcccacactcattaaatgcctgctgtttgccaggtgccgatagggtgctttgtatatgttaaccttattcaatcctcttgatagccctctgacactggcattgttattatccccattttgcagatgagaaagctgtggttcagtatgtttaaatggctcacccaaggcagatacagctagtgagtggcagcatccagaatcaaactcaggctgttctaactccaaaactctgagtatttctgtaataccagaattccttttaagacctgggaaaagcccagcagccccaggaggtgccatcctggagccagaaggagggaccagcaaagttgccttaccatttgcattaaaacaccctccatagctgtagactgactggtgcccctgggtctgcaggtaccagctttgcacttagttgaatctccagccttaagtgtccttcccaaagcccagggaaggcaacgcagtttgctgcagggatcgtggcctatgcaaaggcctcattgccacgctcagcatcatcagagactgtatgtttggtctctggatggaggccgagagggactcaggcctggccgtctcagaacttaatacttgagttaccgagtgtgtgtgtgttttattttggggtgtgcttaagtctctcatctatttttgttttagaattttggctattcctttgttacctacccaagttgatttatacacggccgtcgtcctgtgcagaaggcaggtaattggccacttcagccctgggctaatggagggaagcaattcatttgatgaaacaagttaagcaataatttagaaactttctatctgaacccttgtgatatcatatcctcccagatttatcctcttaactctgtccaactcaggcaatagtcagaatgtcttttcccttcctgtcctcacaccagtctgggtcagctgtcaaggacgtgggcaccttgaggtacttaaaagagtttctcttagagggccgggagcctggcttcccgtcctggccctgtttctcactggctgtgtgactctgacccactcacttaacctctctgagccccagaagccacatttctcaagtgcagtagtgatattgaatgtcccaaaggcaatgggtaacaccagaccagggatttccagatgaaatgctctggcttacttagcatgactcagacccgctgcttccccattagcaagaggctgctttataattttttttttttaatggagagatatcaaggcttaaaatgacattaagaagtcttcttcctgactgcagtgtgtccttcaaggatcatctccccatctacctctctgtgtactaatgactccaagaaagcggaagggggcagcctggtagaaaatggaaacgtttttctgtaaaggccctcccatgcttccgaggcctgcagatgaagggtctgacttgagcctctcagaacccaggagaaagaaacaagcctcactcatcctgtagcccagaggaagaaattctagcacccagagaggtcaagcaagtcctgcaaaaccacacagcaatttgatagcaatagctggaccaggaactcagggattttgactcctaatcttgtgcttctcaaactttagtgtgcacaggaaatctgaggatcttgtggcaatgtatattcgggaggtctagggtggggtctgagattctgtttttctgatgagagccctggtgatgcagatgccgctggtctctggagcttacttggaatagcaaggggctccagaaagctgggaggctggggtctttgcagcccaatctaggagggagtagcccttccagctcctgtcgcctgtcccacttcctgttactaatttgcatgttgcctcctttctttccctcatgctcctaaggcctgggcactcccttctctgccaccccctatgcttccccagcccattttctctggttccgtcttgctcagcctttaagtaaacagcacttctcagctgggttgcatgaggcctcctggctcaggagtctgctgctctgggctcacagtccctgttccatggagatttgagtgcctgaattaactccctcttggagcaataaaccaccctgagtgctaacctagtttgtatttttagcgtgtgctccatcaattacttaacttgcagagcggctcctctctgctcatcagggaggtgccaccaaagaatgttcttcctcaggcttttgtgagttgcccctctccttggtcccacctcctgtgaggtcagagtcctttctccttgatgctgtatccttggtatttaggaggcaaaggttattcaccccgttttatagaagcagaggaaacactgaggtccagatagggtgacaacacagtacagtgtgatggtgccaagaagcaggtctcctaagcccttcaccttcccactgtggggaggtaacaaatgatggtgggtggtatcttcccaggctacgcagggccaggaggctctctctgagccagttttgcaagatagtgatatgaagggaagcaggtgggggccatgcactgtgttacctcaggtagaagtgagctcctcactgtggtttttacttgtaaagtccagccagaaaacctacatgctgggagaatggggccaggaccactttagtcagtggtttcttccaccttctccccaccccaggaggaccttcagccatccctagataagtcaagacttggtttgagtttcatcgaggtttctcccacctctggcagaggcatggatcagcaacactccaccaagaggccagcaagatgctggctgtttcccaagctgggatggggtgagagagtatggcttggaaactcagaggtgatagaggcagcaccggcttcctgagccaagctctccccatggacccaaggcccaggcatgagacgacttcattcatccgtccattgaggaaacgtgagcactagttgtgttcaagacaccaggcagatgctgtgggtgggcgggactctctcccgggggagagcccagggcacagtccctttcccagggaccttacatcttccagggaaagctcccatgtctgtctgtaaaggtaaaagctaaaaacatcacacagtgtgtaagtgcatgtgtgagggtgtgtgtgtttatccatgtgtgcataggtatataagggtctctgtgagcacatgagcatctatagatgtgtgtatgtttacgtgtatgtatgtttacatgtctgtgtgtatgcatgtgtatttatatgtctatttgagtgcatacatttgtgtttgtttgtaaatatatgtgtttttacgtctaagtgtgtgtgtgcacatgtatgcatttgtttctccatgcatatatgtatttaagtgtatatatgtttctgtgtatgtgtgtgtgtgctcatgtgtgtatgtgttagcatcagtgtgggtatacatgtgtatatttgtgtttaggtgtgtgcatctatctgagtatatgtgctgtgtgtatttatgttagtgtgcatgtgtctgtgtgcctgtttcattgtgtgcatgcgtgtatgtgtgtgcatgtatgtgtttatgttagtgtgtgcatgtttctgtgtgtgtccgtgtccgtgtgtatgtgtatgtgtgtctgtgttgtttatattagtgtgtgcatgtgtctgcttgtgtgtgtgtgtgcatgtgtgtgtctgaatttgtgtgtctgtgagcatggtactttgggctgtgcctctgtgaagccccatagtcagtggggagtccccacacagccctggctataggctgctctggaatttgcctttgatgacttagataggcatgaacaggacatgtcccctggggaagatctgtgagtctgtcctgggtgtccccggggcaatgggcagactcacggggaaggaagaggaagacaaagcacacagggtcaacactattgcatctggagcgtgcctgggcccatgctggatatgtgacagactcagaagtgagccagacctgtctagttggggcaacaagccccgtaagtgttctgcctggaggggtgctgaggcaggaagtaaggaacctctgtggaggggtgacctagtccagccctaaatcaagggtagaaggctgggtgatctgtgtccccactctcctcagtattgaaatctccttaagcccaagactgtactgaatcatgaatcaagacacatccatgtctggtcctgactctgccgtcactgtgtgaccttgaataagtcgcttggcttctctgggccttgcttccctccctgtaaaatgaagacattggatcatctcatcatttaacaggaacaatgaaattctacagcgaaacaagttgccccacaaatagcagggtggggcaagggtcaccacagaagagcaacttggaagtggtctaaggatgtggctaagaaaagagggagggtccagggaggcctcttttttgaaaaaaaaaaaagagggagtacaagtgcggttttgttacatggatatattgtgtagtggtaaagtctgggcttttagtgcacccatcacccaaatagtgtacattgtatccaataggtaatttttttttttcttgagacagagtttcactcttgttacccaggctggagtgcaatggtgtgatcttggcttactgcaacctctgcctcccgtgttcaagtaattctcctgcctcagcctcccaaggagctgggattacagtggcatgccaccacgcccagctaatttttgtatttttagtagagatggggtttcaccgtgttggcaaggctggtcttgaactcttgacctcaggtgatccgcccacctcggcctcccagagtgctgggattacaggcttgaaccaccatgcccagcccaataggtaattttttatcccacaccccctcaccgtcccactttttggagtctccagtattattattccattctgtatgtccatgtgtactcagtttagctcccacttataagtgacaacatgggcttttagtgtacccatcactttctgtctgactttgtttctgagttagttcacttaggataacggcctccagttccctctgtgttgctgcaaaagacatgatttcattttttttctaaggctgagtaatattccatggtgtgcgtgtgtgtgtgtgtgtgtgtgtgtgcacgtgtgtaccacattttctttatccagccatccattgatggacacttaggttgattccacgactttgctaatgtgagtagtgctgcaataaacatgagtgcaggtgtttttttggtctaatgatttcctttcggtagatactcattagtggggttgctagattgaatagtagttctattttgagctctttgagaaatctccacactgtttcaggaaggctacttgagcttggtcttaaaggatgggtggagagggaggcagagagaataataatacaggaagaatctgagaggtgggagagcgcagcagactttatcaacgaacattcatatagcactcactgtagagcaggaatcattctaagataggggttagtaaactatggcctgcagggcaaatctggctcactacctgattttataaataaagttttattggaacatccatttgtttacatattgcctatggctggtttggagctacaaggaccgaagtgagaggttgtgagagtctgtgtgacctgcaatgccatagaatatttgctatctggctctttatggaaaaagtttgccatccttcttataagatctttaaaagcatgggctcatttaattttcttgacaaccatattggaaagttattgttattgtgtccactttatagatgaggaaatgcaggctcagagagatcaaatagtgcgcctaaggccacgcagtgaggaaggaggagatgagacatgacctcaggcagtgggctccagagagtctgtgttctggccactgtgctatgccaagagcgggcccctgggaggaaggctaagctgtgaagattttgggtgctggtcttcagagcactttcttgaccttgccaggtttgtgaccagcacagtgatgtctcaaagctgtgttttgattaccacaataatgtgggtattcggggaccagcctgcctaatggggacgctcagtctccaactgtgtctctcaaatgctagacagttcttggaggcaacacctacatgctgttagccaggcactgctcacaagggtttctccataaagatttccgattttagcttattagtcagtgtttgtatagttgctgcatgctgtggtctgtgtcccagctgcctgctgtagatcacaaatgcttggaaggcctggattgtgtctctctctgtgtgttgtctccagggagaatggcttgtcatcaggtcagaggattctggggccacattcccattgcgaagaagctgtcaaaatgcctgcatccagaggtgcttcaacaagagcagaggtgatgtgcaggaagggctggtgattgtggcagaggctgtgaatgccctgcccatgcccccaggccactctattcctatcccactcaaatgcccctactgtcagtgccttccctccccctaccagtgtgagccaagacatctggaagtgcctgcagcaaatacccccaggtgcagcccttgccaatgatagaccctaatgggagtataaataccccagattctacccctcagatgacacagctctgaggcatggtctatgccagtgctacccctatgattttctgtaatgatggaaatgttctgtatgtgtgctgtccaatatgatagccaccagccatctgtggttattgagcttttggaatttggctagtggactgaggaactaagtttttcaattcaagtaatttaaatgtagatagctcaatgtggctggtgccttccatgttggacagggtggttctgccccatctcccagaggtctccagtggcattgagccttggttgtctgcagcagtgtcctgaccattaacaaaccctgccctctcactttcccattttatttccccactccccagctggttctcccctgggatcactacccaaataaactattcatgtaagccacatgaaattgccatttttgaggttaaaaaatggttgaatgtcagtattttcaaatgattaaatttgcactgaaatctctaccatgcatgtgtgtctggggaaccccaccataacagggagttgagattcgtgtttgttcatgtgtgtaagttgaagtcattccctgtccaggcagggttctaatcccagctctgcttccaagtggctgtgtggccttggaaactctctgtgccttggtcctcagggaggaggacctgcccatacccctggccttggtgcctgccctatctttagaatggttggaaggaacaagggagctcatagatagggctatttgttaaaagaagccagcacagtgaggagggaaggtgccctcctgcatgggtggggccattctggggcacagtgccctggctgcattatccctgggtggaggatgcctgcttgtggctgatggaattcagacagtgtgtttctttgatgctacaagactggctttcctgctgccccactttgtataatcgggtctttttggcagggaggacttagtagctagcgtgagctcccaagtaggaactctaggaatattcactcgggctgccgtttgatctgagcaagagcatgatttgatgggaggctgctctgggccttacatttgtttccctcatttagaaaaaggcagtaaacagtttttaactacattgcgattgtgaggcttttcctatataactttttttcctggaatggaaccagacaggatggaggcactgcactcgcaggcaacatgggttttcccagcccctccatcttcttgaccttcctagggatttgttaattcagctcagattggcctttccaggaagctaccaggctctcagaatgcccgtgctggagggaggctgatcccaccagggaccccagaggaaacccagagttcatgccaaaatatctagtagaaggagtttatatggggaactagttataaaggtgtccaaggagataaaaagccaagcaaaaaatggagaggcagcccagagaatagcaatggcaggaagctgctagcatcctagggctagagggggaagggaggagctggttttctagaactcaggatccagcagcacctggcggatgctggaactacagaaggcctgctgggctgggcaggatcacagaggaaaggactctggggagggcaggatacccagaggtgatagatataatgatggacatgttctctatctggagatgccaccaaatgcagaaggagggagaaatgtcctggtttctgcctgcccccaccctgcagacttctgcctgcattcctgctgaatagaacaaacttccctagaagaaagagcgagggagcctggggagtgtagtccacagtctacagacgaggggtaaagactgggtctcagagcaagcaggccaatgactagcagggcggcccaagagcctttaagtgagaggctgtcatcctggggctgtgaatgaacttcggaggggtccttgcccttctaggaagtgcaggcatattttgtctctatgtaagcacatgcatttctccagaaagaaagttgatatcttcagattctcaagttggtctgtgccaccaaaagattcaacataatcaataaccagtaatccaaccagcttatcttaaacatgggaagtctcagggctcagagaaacacccatagcgacagtgtctatactcttggtctagggtcctactggatgttgtccttcaactgtcctggaagatccagcctgttaggagagtcccctgtctgttccctgcctctccagaatcaactgtgtcccatcttcttggtcagctttccctgatctcaagcacacagacctgcttccacagtgcacttctgcagcctggggaaaccacaccatggatgtggatcctggtctagatgcgccacatagtgctcgatgcaggcagagctggcactggaaagagggcccagtctcctccatgcagcctccctccttcagcaaacatttgccttgcacctgccatatgccagacgttttgctaactgccggggatatggcactgatcaagatagatgatgtccctgctgtcacggaggtagaagtggaaacagaaaacaaacaagagaacaaatgcagcaacaaggtcatttctgattatgataagtgtggagataatagagtagggggctggcagacagtgatgcgggtagagtctgggggctacttttgatgggaaaggtttctctccggaggtcctgtgcaagctgacatgagaaggatgagaaggagccagctttccaaggtctccagagaaagtatgccacatggggacaaaagccagtgcaaagtccctggggtgggaatgagcagaggaagaagaatccatgcctatgtggccaaagacgaatcctgcctcacagtctttgactcttttgacttcccctgtcgtgcctcctgcagactcttcttgcttccctgggagaatgggtggcaaagagtgccttccttagccatgcttccttgtcagcacagtgcctggcaggtggctggaagctacagctgaatttttgcagtgtctttgagatgccaggaggatggcagatcatttctgttcaattcatcagccacacaaaagccctgagatcaaagagcatgggcttaatttattttgtttattttgcagaggaaatagtgcttccttggactgaaagctctgaggactaagagctgaatggaaagggggcgtttggattaaatgaatgggctggccagctctgacccaatttccacccagtgcagcagtgatgggggagggaattgccttctggctctctgctctggcccaggggctggtcatttctcaggtctgggccttctgtgtgagtcaggtttgatggaagtgtccttgaaggtgattcatggggaagagaggaggggaaccgggagtagtggcctcaagccctgcctgagttcatccttggatccctcagcctttcttgacactagctcatcaccttagcaatgaggacaggtgcagattcaggtgaagctcacctacatttcataggagcctatcaaatgtgagtggactcggagaaggaaatcactgagcctcacatggcaaaggagcactcaaagtagggaattctgaggaagcctagaatgggctgggcagggagggcagggtacagtcccactcatcatcgtgaccaggctggacctgtgattgcagtgaatgagacttggccaggagaggcttgggtctaggagtcctgggttcgagttccattaattatttgaccctgagctggtgactttttctattttagaagcctcagcctcttcacatttttgagtaggagtaagggtagctgcctgtgcttgggcttggtgtgagagcccggttctgaagattggaaagtattgccaagcacatggtaggtactcagtaaatatctgtttacttaaatgaaagaatgcatgaataactgaaagagatcaaagctgatatattcttctagaactttatgactacagggaatgaagattaatatggcaaggatagggaggaagttaaagccaactgccacaaggtacctgtggtggagggtccagggttctagtggcttggcccactctttcaggtgccctcatctcagaaagatcaatggtgcagacagactgcagtttatctagttcacattggatggatgccttggatccacagccctaggatacttgggcccatttttggatttcttgctcttctagattgttttagacagcagtccatatgaagaccttaagagagaatatagcccaagagtgatggaaggctgcaaccatgacattttgagtatgctccactaattaaaaattaaattgttaatccccaagtaaagaaggaaaatgtgagggcatctgaagaagagagcatgttcgtgtatcgtgatcgctgatcaactctaggtttaacagacagaactttatgaatgaggaatgaggagtcatctaacttagggtagagtgaaagggggtcaggtggctaaaacacaaaactggtgaaaactgctaaagatagccacagacatttgtaaaattataggcagagaattagaagatgaacgagatgggagagtatcactgcttgggaaatgtgacactgttagcaaacagagaaacaaactagaaagtgagcatttctgttttttttctctctcttgtttctacctaggattactgtctttagaatgaaaaagagaaaatctcttgcacagagctagagaggcactttgaaatgcatttctaggaccagaggggctctatggctgggtcctgaaatacactgtagatgtggttgcagaagtggggagtcttttgatggactattttttcattatgggttcaatttttttgcctttttgaatgcctggtagtttttgattggataccagacattgtgaattttaccttgttggttgctggatatcttagtactcctataaaacattcttgagcttattttctgggacatgatcaagttgtatggaaacagtttgatcttttttgggtcttgcctttgagctttattaggtggaaccagagctctcttaatctagggctaattttttcccactacagagacgctgctattctcagtactctaccaggtgctctgtgagcttgaggtttccactctggctggtgggaaggtgaaccgttcccagccctgtataaactctgggaaatgttctgtctgctcctttagggtgtttctctcccccaccttggatagctttcacacatgcctgtgtccaccaatacttagctaaagactcaagggggtccctctgctgacctcaagtattcactgggcagttctttttgctgccctggcctgtgaattccagcctccttggccttgctggaatccagccttcatctcctcaactcagggagacatctgggccctgctggggtcctccttctttctgctgtgacttggacgctctctccagacaggaagttgaggcaactgtagggctcacttcgtttctcctctctcagggattgctgtcttcccctgactgagctccagtgtctgaaaatcattgtcttgtctgaatttttagttgtttcaggtgggaggagagatctagtccatgctacttctttggagaatctttgaatggtgagataagattatttatttatttatttatttatttatatttatttattttttacctctagcattctggaacttcttgtgcttgttagaatttctcagtgggtgtcagaagatggatgctgtaatctgtattctaatgatgtcgtggcttatctctggaaatactcttgattggattttaaaactgagtgcttaggagcccttagagaggcaaatgctggtcacaggggccaagctagactctatgcaaacaggtcaggctggaatccccagttatcaagggactgaagttaacctgaaacgtttcctttaccatgacttaacctaaggtgcatgataatgagtgttaactgggtaccaggcttgcctttacaccaggttctgtccttatagcaaccccgtcagctaggtacccccatccctgttttccagatgagattaaggaactttcccaaatttagggtctgaattcacatctgctcacccttaaatgagatgccgcattgggcagcatctttcttatcatcttgattagggaggatccaagagctggaacttgaatatgaatcagtaaaacaaaaacaaagaatcagacacaagataaaggatccctctttgtccctgaattgagataagaaaacatcatcagaagcagatggaggctaagtactgattcccagaaaaggcctcatttttagaagggtatttagagattattcagtccccaacttacagctgtggttggcagaagccaagtggccaacagctcttgaggtggtgtcatactcatgggcagacagaaacttccctgacaggattttcccttaaacctccatcgcatgaaaggactttttttgcgcatttataaagtgtataattactatcccagtagctagatgcaaccttgtcaattataaataaatcatcacctcgcctcctcatcaccacccaaatgtctttcacactccaatttaattaactcacttactttattctctaataaactttcacaaaagttaaccccccattcccagctccatctagcaaagaatgctggctggatgtcagccatgttttgggcccccacctgaatctccgcctcaaatgtaactcaaatgtgatcatctcccccatctggggtctcacatgaggacatgaggtatgggacatgaccaggaggcatggccagtcttactgtctggattgccctgggggtcatggcaggcgaaaagatcagagaatgagaaattccttcctccttccagaggccaggtgggagggcgggggaaagggcagggtcttgttgaattttgttaaaaagcactttgctctcttggaatgctatctcatgtctaaagcagccaagatcattaagtaaatataggatctgtgcttttattttcactgctattagcaaagtttgcaggaggaaagagacattgaatggggagtttcatcaaagccaggggtgttccacaggaaaatacttgttaggcctagtttcctgtggtgaaagtcttatacatttcaaatatgttttgtgactctccacaaactttttgtttcctgcaggtttgtaattgagatatatgccctggggagaaaaaacatccaggcatccaggtccttagaaatataggtgccctgataggactgtagctggcagacttgcccataaaacaggtgaggcaggtgcttgaacatgtgattcacatgttgcatagactgcctactcctgggcaggggcacacttggcctgtatttgaatacacctagacttcaaactcagtttgtgaatcacctcctttggaagctgtccttgcaccctaggctggaagcgagctttcgtcctctgaacttcaattgccctgtattcatacctctgtagttcgggctctgctcactttctacctgggatttgagttggtacatgccttctcacctactcgcctggactggactctcctttgaagacagggtcgaggttgaagtcatctttgtgacccctgcagggcattgcacatagcagatgtgacctctcgctggtggtcagatcaacttcaggggcacagggttcctctttttatctgcccgatggcctttgtctagtgtattgctcaggatgacaataagaggaagattctccccctgtttaattccgggatgtcactggtcaggctcctcttgtatctcaggggtccagggctgagggctgtggcttcagctgaggctctaggctaagccagtagggcttgtgtcttgtattattctgttctcatgctgctagtaaagacatacctgagactgggtagtttccaaaggaaagaggtttaatggactcacagttccacatggctggggaagcctcacaatcatggcagaaggtaaatgaggagcaaagtcacatcttacatggcagcaggtaagaaggcatgtgcaggggaactccccttaataaaaccatcagatctcatgagacctattcactataatgagaacagtatgggaaaaacatgcccccatcattctgttacccctgactgggtccctcctacaacacatgggaattattacaattcaagaggagatttgagtggggacacagagccaaaccatttcaggtctactactttggtaacctcctggaatgagtctcatggggcccttctatcccctgtactcatgatagtatgactctttgggtgggtctgaggctggacatgactggtggtgaaacccaaactcttattagagaaagtatatcctcttactagtgagataccttaaagttttgaaaaggaggctttttatgataataaaattatgcttttatgggagaaaacttggcaaatacagaaaaattataaagagaaagcaatgtctgtaattctgcaatgcagaaatcacatttgggtgtattttattattatataatgaaatgttattctgaaaacttagattggttaatatatataaatgttaatatgtatattggttaatatacataatatatgtaaagctttaaaatatacttagtttaaaaaataaatctgggtacagcggctcacgcctgtactcccagcactttgggaggccgaggcaggtggatcacctcagggcaggagttcgagaccaacctggccaacatggcaaaaccccatctctactaaaaatgcaaaagttagccaggcatggtagcgggcacctgtaatcccagctactcgggagactgaattaggagaatcacttgaacctgggagacaaaggttgaagtgagccaagatcgtgccactgcactgtgtctcaaataaataaataaatgaataataaagccaggcatggtggaggaccacttgagcccaggagttggaggctgcagtgggctgtgattgcaccactgcactctagcctgggtgacagagtgagacacattctctattttaaattaaaaataaataaataggccaggcgtggtggctcacacctgtaatcccagcactttgggaggccgaggcaggtggatcatgaggtcaggagatcaagaccatcctggctaacacagtgaaaccccgtctctactaaaaatacaaaaaattagctgggcatggtggtgggtgcctgtagtcccagctactcgggaggctgaggcaggagaatggtgtgaacccgggaggtggagcttgcagtgggctgacatcccgccactgcactccagcctgggcgacaaagtgagactccgtctcaaaaaaaaaaaaaaaattaaaaattaaaaaaaaaattgaaaaagtgaaatgaaataaaagtaacacatatggtaaacattgaaataacttataaaaatataaaatgaaaagtaaaagttttctgcccaccctaccccacccaccctaatcctggaaacctctctccaaagatgtctactctttctaaattcctttgtatgcctgtgggtcctgggagggatgcatataccagcatttacatgtgtgaatacttagtttatttattgattcttaaacctagaaacatgtaatgagcatttccccttgtggttgctgacatttcaaaactatttttaatagcatcaccctagtttatcatgaggatatccagtctttattttctgttgttgggtgtcgagtttcttgccagtttatttcttattaaaggtaacacttcaaaataaaggcagcttttttatttaatataatttggtgtctctgcttatttttttcaggataggtttccagaaatgaaattattgtagcaaagaacagatttttttttatttcaatggctgtttgtaattttttttttttttcggagtcttgctctgttgcccaggctggagtgcagtgatgcgatctcggctcactgcaacctccacctcctggattcaagcgattctcctgcatcagcctcatgagtagctgggattacaggcatgcaccactacgcctggctaatttttgtatttttagtagagacggggtttcaccatgttagtctggctggtctcgatctcctgacctcgtaatctgcccgccttggcctcccaaagtgctgggattacaggcatgagcactgcacccggcctgttagtagtattttgttacatcaaattaagatacattttcaacagaaataggaccatttctcttgcccataaattctttttgatgatttgaagatttaaaaagtaatacaagaaaatatactattgataaaaatttcaaataatacagaagtacacggagggagaagaaaaaggggccctttctgaacctcccttctcacatctgaaagaaccctggaattggacagacctgaattcaaatttagatgtcgctgctgatcagttttatgatgttgcgagtcttgattgtctcatatgtaaagtgactatgtcaacaatagccttgtaagattgtggtgaggaaaaagtgaatgtgtgcagaggcctggccggtggcaggcactgtgacaattatcgtctttgttggtaggttgattgcctgttctctgtgtcatgtgtacccagcagactccagttgatatcaccctagaaaacaatttcctcattctgataaatgttggcccttttctgcaagattgctttaaatttggagccgatggaatcacaaggctgtgacctctccatgcaggagacagtgtttctagcagcttgaggggctgcagctgccccaccgagcttcaacgggtgtcctggtgcaaggttgtcctactttttgagtagcaaggtcttttcacccctttatgagaatgggcacactctggatatctatttctgagaactctgacactggagagaaaacaatcagttgagagaaatcccagcttggatgggcattcactgaacatccccttggaacatcagcctgctcaaaattttaggcatgacaccgtaaaccctgctatttatattgcaccagattctgcaaatatctttagtaacactaagccctcggttgttttaactgcgtctctaattataacctttttaatatttacagtggtgtcatgccatcctgattaaagtgccgtggtgagagatgctgttggcacctagtagcagcattgctgatgagaaggtgtcactaaagctgaccttccatcacttcttaagtgagccatcatttaggatggacacagaggtaccaatgagcccctgttcttgatcccaggatccaaaacctctcaggtgaggcatctccttgtgtgttcttcaggagccagcatgctgtgtgattcctagggagccagaggaagccatgctcttgtgatggcatatttatttcattggcctcatgtcatttggtctacctgatcagcagctgctgtgagtgtgcctgaaagagtggcaggctctgcaagagctccgtcagcaagtagaaatgctaaattatctcatgtgtttatcaaaggtttattgagcaccttttgtggcagaaacatgggctataataataatgaccattgattgaatttctggtgggagatgggtactggtggagaccagtttgagctcatgatgtttattaggaatccacctctgagaagggagaggcagaggccagagtgacaagagggacaagtcgagagctgatgcagcttccacaaaacctcggccaacccagcagacaactctggagtggatttatccaacagagatgatccctttgggcccaaattgctgtgcttctgtaccccacctcactctgtcaccagatgcaggctgtcccaggaagggtgaccttggctgaagctgtagctgaggctgagcctgaaggaaccgacagctgggggctgtttgcaaagccgtctccctgaagctgggcctcaagtccttcttcgaggtgaggttgggggcagcacatctccatggcatgcagagcttgatgaggagcttgagtttgacctgaccctgaagggcaagtggggctttggtaggcagagaggagcaggaagaacttgccagctaagcaaaacagtgtgaacaaaggtatggaggtagaaagagaggactttgtaaggaagtgccaatatggaaaacattgcagtgtggacgcctgggcagagaggctgtcaccttgagaaatggccaggggccacctctagggtgaccttctctggtgttactttctagctatcttctgaagcctgtctttcctgcccactctaaggaagtcaggtcaacttagggatgtgtcttcccaagtgacccccattggcctttgttggttgtcctccaagttattgccttgggcaactgggcagattatctgcatcttcttgcacagagtatggattttcaaggctcagctcatccttgactaagattgaggtgacttctagggcggctgaccggggccttgagaatctccctgggccctttcattcatttctcttcatgggctcttttggggtgggtgccaaggatctgggtacagcttccctaactcccaagcttggagaggccactctagctcttggactggcatctgggccagaagctaccagctaggcaacccatatttgctgggcatctaatagcccctcagatggtgaaaggctggtctttggcctggatggcttatctgtttcctcagacagctccagactgaagggacttcataggcagtgactctgtttagtttcactggtggtccaagggcctccttagctaggccctgggggaatcaggggctgtaagagtgggacaccgaacagaagtttcatctcatggaggcaggatttagaaagtgtagatctctttgaagagaggtttcagggagagaggtttcagggattagggtccagccagctccctcccgatgccagccttacctgctaagtgccttctaagctttcccactcaccctgtctgtgtttccagcctcttgtgtttatctctctctccagcccacactgccttttggccgaaaagggccataccttgagtccctgttgcatgaagttggatttcctttcatgtgtcctcagaggccctggcttgggtgttgtcatggcattttgtgatttgatggaggaggagagatagagcggccccatcgcctgtttgcgctagcctctctcagcttgaccgatgactgtgatgacatctgtggacagtaagcaggtccctggtgggattgagtttcctgagctattccatatcagcattcgagaagccagtacactggctgctaattgtgctagcttgtacctggggctgggtttgggtttcaggtccctcccttcctccctttctcccaatgcttggtcttattaggaaacattgcatcgctaaaataacaattactctacagatagagtaatagaagtgttcaaaggtagggttaattagaaactttcattaaaggaccttggaccttgttgcaattggtcattcattgatatttttctgatcaacaaatcaaccatagtttcttttgaataattgcaagattttttttatttttcatatgtgtgtgtgtgtgtgtgtgtgtgtgtgtgtctgtgtatgtgcgtgtgagagagagagagagagaatatggacgatgcagaggtggatggaggattattttctgttaaaatccccagcgtggctcagctcacctgtggggcctgcctcagctctgcatgccagctttgggctgccagatagtcttggagcttgccttatagaaagtggggatcctagccccatttttttcctgtggcttccctgggtttttctgaacatgaacaaaccttgctttccatctctaaacgctgctgggtggtccttgccgttgggattctggaattctggccctgtctggggtgagccttgggcatctatctcataggcactcatgcaacctcagttgggttgctatagaaaccaaatctcatggcctgctgggggcctgtttagttctttatgtcctgcctctgtctggggagataatgtggatggtgacactgttgttcactgctcaagtggagaattccctctatcacccaacaaggcttttcaaggacccaaccacagaagggactcggtaactcttgggtgtgtttttcctcttgctcggtgggggaatccaccttcaaagaggctgcccagctgctccctgggactcagcaggttcactggggctggtggtcctcaagtctttttgaatgccggggaagttcccaggacaatctccagagtggttaggaggcctggaattgataaccaccctgaggacagcccccgtctcaacatgggagacaagagaggcatatggcatggcattatagcattttacagctcatggaccagctgataggatagtgaatataattgccatgtgacaaactaaagtggctacaagtgagctaacaggtgtcgtttcattattaatttcaatcaaagtcattagttgctatttagggatctggctgcttggccacctacaccgtacttcatctggctgctacagcttttgaagaagacagagaaaagttctctttctctcctcctcctttcttcatccttggagaatttactatggcaaaacattgggtaagtctctggactaagtcttttcccagtgcaggagtctgaacaagtcactgcagtaattttgtatgctggcaagccccagccctattaagtaaggtcctgcaatgtgcttgtcacctttctaaattagagcctcatagtctcaaaacggtcctttgcagaaggatttctttttttaatgacttagcatacaggtcagtatcccatgtgtacttagaaaggatttgtaatctctatttcatatgcaggaagtctctctcccttttataattttaattttatttttactgataaataataaatgtacatatgtacatgtgatatttaatatagtcatataatttgtaaaggtcaaatcagggttattgggatatctatcatattaaatatttgtctttatgctagaaacctttgaattattctcttctagctactttgaaatatataatattttctaaactatagtcaccctactgatctatcaaactctaggtcttatttctgcagaagatatttttattttcattttagcattcagtatttctttatcacaaatctatccaaagattgtctcctttggttccatttgaaaagcaacctagaaagcactttagaggtggagctcagatgttgccatttctgaattagaaataatttggctcagaaaggttaaaggaaacagcacagttgacctagctaggaagtggcacagctaggaattgatccctggcctctgattccaaagcccactccctccatgttccacgagagccaatgcagtgccaggcagggtagattcctcgtgtgctggggtctctgaacttcatgaggggctgccattctctccaactggcagcgtctcaccctgccctccgtgttctctgtgaagcctagtccagccatactcccagcctaagaataattttccaagtcatgaccacaacccatgaatgctctgcagatgcccatgatggggggatagtgatggatctcaaggaggttggtggctatgctagaccatgaatgcagggcttctagacaaacagaaaccagtccctggcctgcaggagtgtcctggaagcctgccgggaccactgagaaaagctttccattgggaaaacatatgtaggcccctgggagggacagcctttccccctcttttgggagccagtctggcccctcgtgggatgatggtggcccccatgggctttttctttcacttgatttccctgtctatgtgtgtgtacccagccaccctggatcgtgggtgtcaccatggtatcctgtctctgagcaaacacatgagcgaaaaaacaaacaagcattaggaaggagggctctcccccacaccttggccacctatgcggagtgagggaccctgagccaggtaggaggagggaaggtgatggagattaaacagcaggtgtcagacagtcagggaaatgcgtttggattcacactggatggtcaggagccccaggtaccaaagtcaaacatgctgactcctgtggccacctggtcattcctcttgggtgtgaaggaggaggaggggagcgtggagaaaccaacaacttagcaaatgtgtgctgagtcccatgcatataggtgatgggagttggactcagagaaaagctgccagtaacaccccttagcaagcacttgctgtgtgccaggctctagatgacaacctttacctgctctctcgataggtcctcataagcagtccctagaggtcagtatcgttattgtgcccattgtacaggtggggaagctgaggcactgagcaatgaaacctcttgcccatgatcttacaactagtaaagtagcagacccaagaggccaagccaggctcatctgacttccatgccaggtccctgctaagattaggggtagggagaacagcttaggagctggggcaggagagtgcttatgtgtggagtagagaaagcccatcctagatggggaggtggcgggggtctaggtggcaaggggaaccctgggtgcctggcttcctcctgcaggcactgggaacatttgctctgctcacctcctggctctggatccagaggagtccattcctccaggtggctgctctcgcctgggaatggggtgggggtgagagtgaaggctgaatgtgggtgcagtgagtggtaaggtaggaaaagctgtgggtggctagagtgaggtcttggccccataggcaaggacatgcctaaagcaaacggacctttcgagtctcctgggtgatctctttcctaaaacccaccctgactctaagaactgtgagtgaccccagcacatctccttgctggcgcagttgagacagggctgtccctagctcatccaggacagttctgaagccgccctgaggctgtggtggctcaggtggaagacaatggcctggagggagggagtgaaatcctactctccaatcctgccaactagggaccctctctttgtttgcaagaccaaaaaaagaagaaaaaaaaaagatctcaggctattgtccaatgcttctatttatagctgccaaataattaagcggatcagcccttccaggatcagaaggggccatctagctggtggaccatatggtgagtctgcagggtcgcagagtggttaacaggagggaagagaggggagagagtttgtagagcctcttgttgatgttcatgcttcatttcttctcagtgtgtttttggtcaacagaaagattaaaaatagcattaaaaaattctgttctctggatataaccctgcgagggggtggggggactttggatcatatttacttgcttccctgatgacgcagagtgccaaattctaaagtccttaggatggaacccagctgaagacttccagctgaagtatcccccttcttccttctttggtcagtctctgaggagtatcatgaccttaacttcttgctttcctctgtcaagacccaaggactccttggccaacactttggggaatttattaattttctccctgcacccctagtgtatccagtgtgtcatcagcagacatttgggtcatgatgctcctctactctactgaaattcctctatgactccctattacttataaggcaaagttcagacccagcctcagctcacccttcctgcacccctgagccatcttcagtcgttcagggcccttcacctttccaaacatgagagctggccctttgaattttgattcttggccgggcgcggtggctcacgcctgtaatcccagcactttgggaggtcaaggaaggtggatcacgaggtcaggagatcgagaccaccctggccaacacggtgaaaccccgtctctactgaaaaaaaaacagaaaaaattagccaggcatggtggctggcgcctgcagtcccagccactcggagggctgaggcaggagaatggcgtgaacccgggaggcggagcttgcagtgagccaagatcgtgccactgcactccagcctgggcgacagaatgagactctgtctcaaaaacaaaaacaaaaacaaaaaaagaattttgattcttgctggaatgctttctgccctactctctcctgttcaagtcctgctcactctgcaaaagccagtgacatttaacctcccaggcttcctccaactcagaatgagctcacggtagaggggtttttttcctccccttttctggaccgttagagcaattttgtctgaacactttcatttgacaattaatcatgttctccctggcagcatctttcccactattatctcaaagaattatttaaatattttatcagcatttaaatcttcacttttgtcttgctccctcccctggaccgagtcttcctggaggtcagagagggggtcttgggcttctctagcaagcagcgttttgtggtggtcacctgtgcaggcttctgaaactgttgcccatgtttcacccttgctctgcctcttacttaaccctgtggccttaggaaagttttaatttctctcctcctgagttttctcacctatagaatgtggataaaagtcacacccaccttgtagagttgatgtcagtattaaaaacgtgcaaagcgcttagaccagggctctgaggtatctgctgagctccttagtatgcctctttcccctccacccagcatctggcccactgtcttgaacataggagatggccagaatttgcttgttttttttcctttggtgtggcgtcatttgtaaagctctgacccagagaggataggaaggtttcttaaggtcacatagcaagaagtggtggagaagctatggtgtcagaattgagagtccagcactcccagcccccgccctggccccaaggcctttcataggcagccctcttgcagggtctttactgtgcgtgggacactggagaaagctgctgtttatgctcgaacaacttttgcatgaatcagatggacttgaagattgccaccactctgcaggactccaggaggaccattcacattgcattctgtgggcatggtatccccttgaggtgtacgaagaggccccaggtgggaaacctccctgacaaccctcccatcccacgaatgcagctaaaagacacaggaggtatcagggccacagagtgagaataaaatcccactggagcaggtgaaagggctccgaagataggtaccgctgcccttttccgagtactgcctctcctgctgtcccctggccactttcagagagcccatgggttgacttagccttcagggtttagggagatattttggggtggtgagcttttcccaaatacccatctctccctgctttgagccaggggagaaatcagagctggttgggatgtgtgttgtgatgatgtgtgcagatgttcctggatcaacactctccttcctgcctgcccccttcccacccccatactccccagccacaaagggaatgggatgagtgggtttcagaagaggccaaattatttctaattcagaaatggcaacatctgggctccacctctaacgtactttctaggttgcttttcagatggaaccaaaggagacaatctttggatagatttgtgatagagcaatacagtaaaatttaatgtttatggtataatctaggtgatgggatacaggtattgtctgtgaaatcctttcaacctgttgtatgtttggaatcttctcttctcttttcttttcttctcttctcttttctcttctcttctcttctcttctcttctcttctcttctcttctcttctcttctcttctcttttcttttctttctttttttgagagagtctcgctctgtcgcccaggctggagtgcagtggcatgatctgggctcggcctcggcctcccgggttcaagtcattctcctgtttcagcctcccgagtagctgggaccacaggcatgcaccatcaccccggctaatttttgtatttttagtggagatggggtttcaccatgttggtcaggctggtcttgaactcctgacctcaggtgatccacccgtcttggcctcccaaagtgctgggattacaggcatgagccacctgggccactacactcggccttgtttgaaattttcttaataaaatgttgtggagagaaggaataaggactttgtagtagccaatcctggctctgcccctttttagctgtgttaccttgggcaaattacttaatgtctctgagcctcagtttcctcatttgtaaaaatggggccaatcttacaacatatcatagagtagtgagataatacatttgaagtacttctttgtttttttttttttttgagacagagtttcgctcttgttgcccaggctggagtgcaatgacacaatctcggctcactgcagcctctgcctcccaggttcaagcaattctcctgcctcagcttcccaagtagctgggattataggcatgcaccaccacgcccggctaattttgtatttttagtagagacggggtttctcctaattgaggctggtctcgaactcctgacctcaggtgatctgcccgccttggcctcccaaagtgttggaattacagattcaggcactgtgcttggtactacgttttttagaaactggatgccaacagaaaaattagagcccacatgaaagtctagttttcttctggtgtggcggcccatgcttctagtcctagcaacttgggaggctgaggcgggaggatcactttgagcccaggagtctaaagctgtagtgagctatgattgcaccacttcactctaggcaacacagtgggatcccatctctaaaaacaaaaaaaattaaaattaaaccaaacatttaaaaaagtatagattcccaacttctctacactggcagcatggggcccagcattcacctaggtctgggtagcagctgcacccttggcctccgggtgtgtgatttccaggccaccataggctctgatggcccattcagttctgtgatcccagcctaactctttaaagcatttgagtttgtcactcctgatcgcatgcagcctcttactttaaggaagacgacccgagtcagccaggtaagggatttgcctgaaatcatctattttgtccacagagcatggtcctggccccggtgcaggcctcctgcctctgtatgttgtggcctctctttgtgggtgactagcccctgccatcagaagcccattaagctctgtgaaattcagaagcttggtccaatgggtcttggttgtggctctcagggggcctggggataggttaggaatgtatgtaacactgttttataaaattatcacaaaccaagttccccttggtgacttgttctgaattttctatccatgaatgtttttatatctttctgctccaaaattttacctgctgtaaaactatataagaacattaaaagacatttacaaaagcagtcataatcccaccaccatagcacagcagctgttcctatctttgatttttagaaatgctttcaatcacagaaaaggctattatttttatccggtgccactgacagtatattttaaccgaacttcctgcctcccatcctcccactctccccttcctttttctccctgtcttgtgcttttctttaccctccatcctttcccacctattgtccaccaggtactacaatccttccatcttacatccagagtttctggagggtacagccacacaatgctgctccgtggcagccctggcccaccctaggtaatggagttctgtgctctgtctggtggtcaagataaattccagatcctgggaggcagagtggggaacaccaggcatcagcaataagctagacttatggctccaggctctcttttccctccactaaagtggaacattttggctgaaggagtgtgtgtgtgtgtgtgtgtgtgtgtgtgtgtgtgtgtgtaaagaaagaagactggaatagtaggactttaggcaccaagaatcccctcccttgctagcctggcatattcagataattttcttttgatacctctgacctgtaataaattttaagctccatatggtcatctttactgtgtatggcattcttagcatttatgtatattcatgtcaataaatagttattgcactgtgtgccagaggggtatgttttagtagatggtgataacaaaatgcaaatggcacttccttaggaagttccatgtcatgtgctgctggaaacagcccctgcttctagtgctgtagtacctgtgtgaccttggccaaattacttcacttctctgtgctgtttccttttctgtataatggagattcttaaccctgctgggaggattagttaaatgagatactgtaagtgaagcatgtagcacaaagcttggcgaaccaatggtgcagagattccagttccctccccttcctttctctgcaagttttctttagtgcttgcactcctgccaaatggttagtaatctgttaacaaacacttaagtctttaggggtgctcagacgacaaagggttgcttttggagagtgaagaatcttcttgtaatataaatagtcaactccaattccagttttaaagtttggtacgccttgaattcaacctgttaagttagcccagctctatctggggttctggaaaaatctatccaagcctgatgttgcttgagagcagggcctgggtatgtggcctgtgaaggccagctttgctgtgattttcaccaatttccttacaaacggattttggaccagacttgtgcaagcttcccccagcaggtcttaggaacatctggggatccaattcagccttttctgacgttctctacgtgcagggcctccaccaagtcattgccttcatttcttaagggccatttggctgaacttcacaaagtggtggaaacacatattgcacacacaggtagtctaagatcgggaataaaaagattacaagtcctcccctttcataggcatctgggtcccatggttcatccaaaatgaagacctctgagctctgtcactgccaggtggatgggttgggtacattccctcctctctctctgcttttctgtcctcatttgtaacccgaagaccataggatataatgaatctgggagggccagaaactttggaaatctaattcagtcaacagacctgtgttgtttaggtgctgtctttcttccatgcgcttgatttctttgacattaaataatctgcttatggtgttataggacctggatgttgaaagaaatgttaaagctcatttcagctttatggtttccccacaccacaggtggtgtagcagataccttctagtgatatatggacaggaccctgagtcaccaaggagggatttagttcatttccagttttcttccagtctttctagttatctcagggagaaagtctcggtttactgtttgaacatctcttaacccttgcctgtctcccttttgaacaaaggcacagaacagcccccattgagactgcatgcaaacggaggcatctacctagaatttcataccctggttttgttttgcatttattttgaaagttttcttctattttgtttattttgaaggttatcttctatttcttcactggtgataccagtttttcacatgtggtaatgttacggagtatccttaagatatatttatttaagctgggtgcagtggctcattgctgtaatctcagcactttgggaggctgaggcgggaagatcgcttgagcctaggagtttgaggccagcctaggcaacagagggagacaccatctctacaaaaaattaaaaaaaaaatagccaggtgtggtagcacatgcctgtagtcccagcttttcaggaggctgaagtgggaggttgagcctgcagtgagttatgatcacaccactgccctccatcctaggaggcagagtgagactctctccccaaaaaagatatctttgtttagttaaaaaatttgactccattgaaagaaaaatgtttagtgaatagcataggagtcatgcagctagggcagaagttgtgatgggagtatgtgaataacacatttaagaagcactgatccagtccttcttctagattagtccaaaacccgctgaccttgactccatttctgaccccaccagtgacaaataacaagggggaatctcccactagccaaaaaactccttggaggcaggggtggtgtctttatcgtccttgtatttccagtgctcgacaccggcacttggacgtattcatctatttcacccgtattgatggagcacctgttcctcagcagctgtgttctgggttcgggggtcctgtcgtgagagatgccatgtgcagcattgaatatcttcatacaaaagaatgtatgtcaatccataatggtccaagacatgcatcacgctaataggggagcctctcgcttaggagagggttgagctggtgcaggctggccttgagatgtgtgtcgggagactggttctctcagggatggtgttcttcctgaacacgatcttccctgttctgaccgccagcagctccagcccacactgtccagaacaagatacctcctttccacaggaacgagacacacttccacagcagcaggaagaatgcctgttctggtgcagtctgattttcaagcagtttgttcttctacagagaaaatagcctagaaggtgagaggcaggcctggctgcagatgtctagatgtgccaaggccccttgccagtggtcagcaggctgtagcgctggcctgagcttgtagttagtggggactgtggttggggaagccgaaggaagcttgaagctaggtggtgacgttgaagataaatgtcccgtgtgttgagtgaggaagggacaactctgaggttggggcgtgttggtgacataaaaagtttaactgagcttcctaaatgggaggcattctgtatttggctgtggcttgatggaattgcagttacccttgtggcgtgggaatcagcctcgggaccattaggatattatgatacagtcccttggtgccactgattggcggtgtcaaactcatctgtcaaaaaatgaaatcgatcagccaggaaggatgctggtgttgaggctgacataccttttgagcataataactactgtggcttccggtgctttgacaaaacctcagatacatggccttctggctgagcatctgtgatttcatattgttggcgcatttgttatttccctgggggttgcaaccctctgtaactttgctgtggctgaactaaaaaagaaggcatacacggattctacagaaattatgattctatgaaagattttgaggagatgaggtatctttcagagtgcaaagtgattttggaatataaagtattcctttgggaagaattacctagagatttgtcactgacctgtgttcttgaactataaaacatgaatatgtggcttaagaaatagtttttcttaaggctgggcacagtggctcatgcctgtaatcccagaattttgggaggccaaggtgggcagatcacttgaggccagaagttcaagaccagcctgaccaacatggtgaaaccctgtctctactaaaaatacaaaaattagccagatgtggtggtgtgcacctgtagtcccagctactcgggaggctgaggcgtgagaattgcttgaacccgggaggtggatgttgcagtgagcggagatcatagcattgcactccagcctgggtaacagagtgagactctgtctcaaaataaaaataaaaataaatagtttctcttgacaaataaacaacaaatttttaaaaatgaaatcacctttgttttgaaaaattgaaacttacctcatgaccattgcctgattcctgagtcctgctcctctctgaatatgaagttgcggagtctttttaaattcatgaacagatatccgtgatcttttctcaccttcagggaggttcaaggctccctaatctctactccatcccaatcatgaacacttccaccctcactcagtcccttccccctcaccattcatgaccctctccttcttccctccctgccccttccccctctgtaagtctctctcgcccaggtgtaggataagaaagtgttttgcaacctgtttggtagttttttaaaagttgaaagtttaatgatttgttgttgttttttttgagtgggaccagagtgtcccagccttaaatggctcttttgaaatgacagtatggaagaaacacaacattgaaaatggggacctttgagatctctgctgtctgggcctggctctgccaccacttccttgtgtgagggtgtatctggcctttccctttcatgggcctctgtttctcattgaccatagaagggatttaggtccctcatttgagtgagtctcttcatttctgcatgccagttggcttgttgctgtgacagtgactccaaagctcatcttcaggcttctgcttctgaagttcatgagtctgacactggatggctgtacttgggttccacagttgtgaaatggggaaataagagaagcaggatgactgcttgtttttgatggattttacgaagagcataacagagtaagagtaacaggtgagcagggccttcccagcctcacgcagtgcctagaatagtgctcataagtgactgattaagtgaaggaacataaggtgattctatgagttttgtgcaaagcaatcaaaaagcctcaaggaggcaaagtccctttggcctctcattaagcactactttatcccagtaacccgaaggtgctcagaaggggaaaggaaaggagagaggtagagtgcagctgtggctctgggagcctggagtcctgcaggtgtgagaggcttgctgtatgcttctcctgccccgaagctgagcatcccaacctccacaccctttgctgtgagcctttttttttttcagagatagagtcttgctctgtcgccaggctggagtgcagtggcacgatcttggctcactgcaacctctgcctcccgggtccaagtgattcccgtgcctcaacctcccgagtagctgggactacaggtgtgcaccaccacacccggctaattttttatattttagagatggggtttcaccatgttggccaggatagtctcaatctcctaacctcgtgatccatccgcatcggcttcccaaagttttgggattacaggcgtgagccaccgctcccggccttttttttttttttttttttttttttttttttttacaacagaccagacttcaggggcatgctgcaaatatctagcagttgctgctgcatttgtgttgcagctgccctagggctgagcccttagtctcaactcagtggtctgcaagctgcctgtgtattctttggactggctggagccaaggtaaaccaagagggggccccaggtctgccctctggctgagactcttggctgttcctgcatccatacactctgcttagaatgtcataaaaggattagagaaatccctaggacactgttctgttcccagggctgaaagaggattcctggaataccagaggcctcaaggtatgattacatttcaatccccatgcaaaattgtagaatgtcataccatccagtttctctgtcaatattagttctattgtttgcaatctgagaatgggagccaatctatggcctctccagtgcctgcttttggcaagagagaccatcaagagactgaatgaccagtcactgcatgttttctacctagaatgataggaaactggtcccttgatgtactgtcttcaggagggacattgggctggctgatctgagctggaaattgatcttttatctttctgaactggcgcaagtgaagagatgacagtagatgtgtcagggaagcggggagctgccatcctaaaaggagtagttccctgcagcctggagaggccagggtagaatatttcccaagaaaatcatgaagaggacagagaggattggggaggctttattgtgttggtgacgatctgtgaattataatcaaggcatgttgatggacaagtccttagcatgtgttgcctaacagtttattccttccacctaacttaatggaggcccactctgtgctcgccacaatacaaagatgtattgcattgatacaaagacgaatcagctttagtgattctcatgggagttgtacttatagtagattagcaggtgcatggacatgatgtaagtggatggcgcctccttgcaccctcccttgttatgaccactgtgaggtccttctcaactatgtctgcaaaaagtgcctgctttgtctgttctcctggggaacagaaatgctgatgtttcactaggcgttgttcctaggtgagtattctggatggtggtggtggagcctataaaccaaaacatgtctgaaagagttctcaatcaatttagaggttcattttgccaaggttgaggatgagcccaggaaaaagagataaaggctacagtagactctgtggcctgtgctttttccaaagagggttttgagaacttcagtatttaaaggcaggagagtgggaaggagcaaaaagagggacactcaatagtgcattcggctcctgctcagtaaatcttgtattttacataagataaagtaaacatagagtagaggaagaagaagtcagatctgcatttgtcttgaggtgggcagagggatgatttctagtcttgtctttgtcccttacctgtgaagatacattgtcagggtgagagaggctacctggggagataggtgaccttctctcttgcagcaatctgtttaggaacaaagagaaagcagcttttgcatgacaaagttcactctttcttttggcatagtgagttgagggtcccaagattttactttcctttcacaaaccaaattgtgacatggctgtgagaggatggtttcttgtatcttgtatcttcttgaggattaatctaaatcatttgtgtaagagaaggaggtagactgggaatcaggacttcagcttctatgcatggctctgacactcatctcttagtaggattttgaaccctgacttgcttattgcttcagttcctcttgttcaatggaaaggttgggttgcctgatatatcatatatatacatatatgatagatacatattaacatatatataaatcacaatattctttggaacaggaactctgaaagatgcaaatataggaataaaggggttttgtttgagaaagcttgcaagatgttaggtcaaacaaaacaattaaatagtgttcttcttattgcagaactttttagggcctttaatagactactatggggaatttccaaaagagggtacaatatgcagtgattctcaaacttagttgaccatagaatacttgtgttggggagaagcttatgaaattaatattccttggaattctactttgggaattgtaagggtagaccagcgatgttcaaatggtggcgattttgccctcgaggggacgtttggccatgttgggagacattttagttgtcacaattaaggatgggggtggaatggaggagaatagctactggatagatgccagggatgctgccaaacctcctgcaatatacaggacagcctcccacaacaaaaagtttatccatctagccaaagtgacaattgtgctgaggttgagaaaccctgaacttaaaacccccttctgttcctggctctaacacttgggggattaggtggtttggtgacccttccgaacttggcataccagttcaccctcaggcatctttggctcttgaactgtatattattctctagaaggcaggagaggtgaggcctttcatactcatccctgcagacctgcacatttctggcaccagacccatatatctatatatctatatattcatttaccacagcccagcattcctggcagcctgagagctggtggctagttgagaagaacatttagtctccctttcctgggtcttgtttccacccctagtggccaagctggggcagctcgctttgctctgtggtctgacaaacttggatttcaaaacccactgcctgccaggagcagttcccgcagacagagctcagattccaagaagactatctggctcttagagatccatcatctttatgaagttttaaaatcacagatggtttttatggatattcaaggtattccagcctttcatgttttctcttcatccctctttcttccccaatcacacatttttctccagtaaccaaaacacaataggtaatggaaattccattacaggctgacccacagagactgcatgggaccaatgcaattatgtctggagcaaagcactgtcatgactaattagcctctcacataaatgaattttcctatggataacttcagaaaaatcagcctgcaaaacacactccttattagttttccttccttctctgggcttcggagttaggctttccctaaggattctctccaccactgggccacgtgaacagtctagcccatggtggaaatccattttctgcttgctcttcaccccctcagtcctgtgcttagtttcattagagactaagtctcatcagagacctcgttatttttagggtgatgagctatttattgagcaacttgcttctctcttggaaggcaacataggcagtgatgagcaggggctctgtcaccccagctctgcactgacagtaactttgggggaaccttggagaagccacattgggacctcctggttttgtcttcccacctgtagagaggggcattgtccttgatctagagatatcagctgtgattgaatgagtgtaattcacggagcagactttattggccactgaatttagaagggattataaaacacatcttccttcaaaaggatgcttagagctgggcatggtggctcacacctgtaatcccagcactttgggaggccgaggcaggtggattacaaggtcaggagatcaagaccatcctggccaacatggtgaaaccctgtctctactaaaaatacaaaaattagccaggcgtggtggcatgcacctgtagtcccagctactcgggaagctgaggcaggagaattgcttgaacgtgggaggtggaggttgcagcagtgagccgagatcatgccactgcactccagcctgggtgacagagcgagactccatctcaataaataaataaataaataaataaataaataaataaataaataaatgaatggatggatgctcaggattggatgacttattgggcaaaagcctgggcccttgcttaattggttcagacatttgttgagtgttacctatgtgctaggaagtactgctatttcttctgaaggttgtagaatctctaaatatagagacaaaaagagaggggagggaaggcccttgtgaggtgttagcaaagacctcccaccaccactgactggcactgattcagtatctgtatctgggtgctgtgccaagtcatctccacatctcagctaacaccctctgtggtgcatattgatagtgcccccttccaggggagggcactgaagctcacagaggttaagaacccgtccaataacatctgagttagtaactagcagaggtgagatttgagctcagttctatcatactctaaagcaagcctcttcactctgtgtctgctgtgagcattgttttgaatgggtccttgattcccagcctgtattgactttccactgcctgggtgctccagccaggctcagggctctggggaatatataagtgaccatctgggctgggacagcaccatgatgctgatgtgcaccaggaagggctgcctttgggaagaattgctgtgcactgcactcagaaattgcatgtgctagatgttggagctgaactcccctaagaggaattttctaagtggattatgaaatcaatttagtgagttgtaatcaatgttaaaaaatacaggatatcaaagtacattccatgtaatagtgtaggtattgtttcatgaatcctgtgttgcaattacttgtatagtaggtatgtgtgggtcacgatgtaaaatgtatttcttactttgggtccaggtcacaagttggaaagcgtggccctggaaggaggtggggcatgcagcagtgctgcagagggaggtgtgcaggctttgccctttaaggctctgctggggatgccttgaagaaggcagagggcacagcaagtcctggcaagtgggtcagcaaactcactctgactggctctatgaagtgctgcaggggcttcagagatgttataggggaggcccctaccatttgtcaagaaagtgggagagagactagctctgctccgcaagacaagagactataatagtcaacatctacaagaataataacagcagcacactgtatccatctttaactaacacgaactctagcgcagactgtctggatttatatcccagctcaacctcttataactgtgtgacctcgagtcgttcacctaacccctcatgcctattttcctcatccgtaaaatgggcataataatagtacatactacataaacttgttgtgaggattcaatgagttactatttagggagtgctcagaaccatacccagtagacagtcatcatatatacatgtctgttatatacaaaaaaaagtcatataagctttatatgagtgcccaatagaaagctttaccaaggcaagacttgaagcaggccttgaagattactccattggatcttcttcttttcatctctgtcatcaataactgtttatttcaggggccataaatatgttccagacactgcagagtccttcacgtatgtcctacagtctggtgaagtgggactcatatgctcattttacagatgaggaatgaatatttaaagagagtccaagccaggccccgattattctggctgtgtagtctgtactcttgaatcagacgacacagtccctctttggcctgccatctgtgttgtactggggtctggagatggttggtgtcctgttctgccccttgcttagcttatcctctctcagcctcagaaaccaaggccctgtgtggacagaaagcaccgcgatgaacacaggtgcctatttgaagtgctctgttgtcccagactggaggccagcagactcctaagcaggatgtgtcacctagcagagacccatgcatttttaaatgtcctcctgcctttggagacaggtcctgaaaaaataccagaatcattaggactcttagtcatccagttcagccttggggagctgagtatcacagccctgttgtcagcagcagaagtcctgccacctggacaaggctgggaaggcagcccacattgccgcaccagggagaccccaagaccaatgcctctggggtcgatgtgggatgattggtggttgactgatggcaataaatgaggacaaggagaaggcagggcccctcagctgcatgccatgggcaggtttcaacagagtgtgggctacatgtccagatctcacccaagcactgtggacaaacatgaaggagaaggcagggctgctgcccacatggggagtctcatctatttggggagataccagtgctcagaagcctaaattcaagtgctgcaggaatccagggagggggcatttagggaaactggggtggttgtgtaaaacttcccccaaaagagaaaattcaggtgagggtaaccaagatttggagtgactacaatgttaaataaatcggggcaatgtgtttatagataatgtgctctccttctgcaagctgccaccagcctgccaatacttatatcctcatccatccatccatccatccatccatccatccatccatccatccactcatccatccatccatccatccactcatccatccacccatccatccacccatccatccattcatttattcagcacatacctcccaggtgcctgccctggcccaggcccagtgctaggccctgtgtagacaacgagcacagttgcatgctgcctctccttcctgctcatggtctagtgtgggagaccagcattgaacaaataaatcagcaaatagctgtgaaattaaaatcacagtgagtccaacaaaggaaatgaatgggttgtgatgagaaagaacaagggggccctaatttggactgaaccaggctgagtgcatctgtcaaaatcatgcctatcctttgaggctcagcagaaataccaccaccttcattaaatcagtctgttcctgccatttaacaggtcctctgccatactctcttcctccctggtgtcatattctaccttgatttagttttgggtacttgtctgtttcccctgagagatcttcaactcctggaaggagagattgtatttttttttttgtctgagaacctgttgtgagtaatcctctctcagagatgcccaggtgaattgttgaatgaatgaatgaatgaatgaatgaacacagatcttcattcctagccccaggcttccactatgggtatatagcagtccctgtggtgagagcaccagctccagaatcagctgcttactgactttgtgactgtgggcaggtgccttgacctctctgagccttcatttgccatatgggggcagtgctataaatagttgtaaggatggaaaagattagggcatgtgcattacttagattcatacttggcatataatgctttataagttagaaggaatgtgctagacacatccaacaactctcagaatcctcacaaatctgctgcaaagcacttataattattcctgtattatagctcagaaacctgaggtttcaaaggattaactaacctgctgtagtttgcagaataaattagattttaacacaaagcaaaacaaaccaacaaaacaaggccaatatgcaaacctgggattgtctgactccaaaagcttgtcttccttgacagtgtcccattcctctgccaagctgaattctcacctctgcagacagaggctgagatgtttgcattttggaagctcaccgcctggccaaaggctaacatattgttcatggatggactggacatttgaaattacatgctggccttgggagggaagagagaaggaatgcttgacttccacggggtgcctctgccttacccatctcaaagaatcagacccctctctcatttttcaagggccttggggtgagcatcctaaaagtctcacagtctgttgcagcagaaagcgtggctttgtcccccctataaaacatctggagattttcaagtttgtgcagaccccatgtgagcagccagccctgggttggcatggattggagaggcagagaaggcattcacttggctctgatttttcatcctgtggcctcagagcttcagaatacagagtccctacccctggtgtctccttcctctccatccaccatgacaagctgtgtccacattctctttttggctctttcctaaggtatcgggcacaggactatgtctgcccaagaataaaaattataccccttatatttccaaaaggagaggcatataatttatgactaaaactggggtactctgactgaaaatatctactgcttagccgtttctatgtcgattagagaaggtgtttatagctcagaactagaggagaagaaaccatttctttgtcactgagaaactccttgccagggtctctcagtgagaaacaggacatgtggagcccaagatagggcaaagccaagtctccttatcttatttagtgacatttttttaagagtaaaaaataatcacatgctttttgccaaatccagccctaaggcatggatccaacaaaacatcacattaattagataatctaatttccaaaaacagaccccagcgcagacacccactgtctagcagtgatgacaaagggaacagacagctgacatcgtggcttcctccttcagagttcatgtggacacctaccaagaataaggccttggccagagctttatctgtccttggactagaatgtttcttagtgatgccataacaacggggttgacttaaaacaatgttaatttattgtctcacagttcagaaggctggaaggcttaaatcaagatgtcagcagggccagcctccctctgaagcctgtagggtttctccttccttgcatcttccgtgtttctgctggtggctggcagtctttgacttgcagccaccactccagtctctgcttctttggtcatggggcgttctccctatgtgtgtctctttcctcctctcctagggacaccagtcatattggattaggagctcaccctactccagtatgacctcattttaacttgattacatctgcaaagaccttctttccaaataaggcttaccttcacaggaactggggattactattgaaacaaatcttttggaaaaaaacactgcaacccattacaggtgcctaagactagaaagatgggtcagagctgctactgccagtgtgagaaagtggacaagttggagttcacctgggaataagatccttggatggaggagcaaactccagctagaggaccgaagccttgaaatcatttattctgcagatcagtgtttctcaaaacggggttcccctagccatcagcattagcgtcagctgagaaacatgtaaggcatgtaaattcttatgctccaacctaagcctactgaattggaaactctgggctggggtagtttcttattttaataagccttcctggtgactctgatgcacactaaagtttgagacccattcctctaaattctgccgtctctcctcactgcatcacttttcagtggggctgcccttggacactggcagatattttgggttaaagaagaaagttatttggtcaaaatgagtgtgggcagcattgtattggtctatgttgaacaggttccttgactgaaggctatctctgagcttttgctatgctgtatgcagtgagcattgaacatttgttagaagaggaatgatggcatttccagatttcactgcaaagagaagtgtcccttttgtatggagtttcccatcagactggtgttccgtgaatttacactgggaaacatggctctagtccacatatcaaggcattcagtgaatttttatgaaccgccttgtgagaacaagacactgtgctggagagatacatctgtgaacaagacgtggcttccgtctctaggaaactgatagtctagtgcaggagctggcacaccacaggctgtgggccaagtctggcctgccatctgtttttgtatggcccattagctaagaatggttttcacatttttaaatagttgaacaaaaattttaaatgaagaatatttcatgaaacatgaaatggtatgaaattctgatttcaatgtctctaaataaaattccgctggaatacaaccacactcctttgtttatatattgtctaaggccacttttgccccccagcaacagagctgaatagttgcaacagagaccatatgctaaagcctaaaatatttcctatctggccctttacagaaacaatttgcccacctctagtctagtgaagcaaagaggccctgaacaagtacttgcaaatgccttgagtgttatgaaggagcagtgcaaagaccacatgattggaaggttttattgactgatagcaatggtggtggtggagtggaggtggagggtgagttaggaaaggcttcctggggagagatcttaaatatgagtaggacatctggaatatgactgtgtgaagaaggttgttacaggaaaaggaaacctaggacatgcagatccctgaattagaaaagaggagtgctcattgaaggaatgcaagaatgtccagtattgctgtggattaagggaggtgaggccaagagtatttcagtatgtggccagatgcctggcaaaggccagatgtgccagagcatcttcgacggccatgctgagggccttaacttttgcctaagagcaagggggagtccctgagaagagtttaagcacaggcatgatgtgactgatagaaaccttgtggtatctctctggcttcagtgtggagaatgaggggcagaactaagtgggaattgtaccattgcatgatacaatgtaaatgattatgaagcttaggagtcaaccaggggagagaagctgagatggagagaagtgggtagatttgaaaggtgaaggttctctgtgatgcttggcctccctcctgccaggccctttgtgttctctgacaacctaaagaaccttccttcctggttactgggtctgtgctcttggaccctgatatattaataaatattgattgtttgttgcacacctgctacaaatccaccaggcccagtgctagatgctatgaaatataagaattaataagccctggctcctgacctcaggttcttagccgggagactgatggatgtagccactggactagaatgtaatgaggactgataagcagagaaacaagtgatatctgaggggactgatacctgaaaggaagtattgagcaaacagccctggagacgttagctctactgaagaggtctggagaggcttcatggcagaggcagcgtttaggctttctcttaaacaatgtgtaggatttgggaaggagaacagtggtcattaatccaacatgagcacaatgacaggtctattaacagcctccggtgggtgcaggggaggctaggggagccatgtggctggcatgagccatcagtggaggcttacagagagcaaagaggtgctcctgttttggaaactcaatctagactcctgattgcttcatgtgcctgacagttcagtgaaggctgtgctgggaccatgagttaccctcagcagtggatcagcagggcagcagaagacccactctttcactgatggccagggccctgcgtaccccaattcacttcaggcccttccaaggcaggtacaaatcatgaatcacattcccctctctatgactttgtttataggcagagctctaaagctgggataacagcaaactgcatcaacaagttctctggggcctctagcccattgatcctatgacttgttgtgattgcccctgacctcttcactttcttcttcagtttggtgctttggccactgggaccaatgacttccactgaagttttctggttctcagtcctgctttccagggctgtgacacagggtgatttgcagactgatttctgtcctgtgccagaagatacttaataaatgctggcaatgacgatgggtccctgaagagcagtttgcccaatttattttttaaagactttaaaaaaatagtatagacagaaaagtctataaaatgaaaaattacaaaatagcaaattattatagaaaatttgtgtcactaccactgagttcaaaaaataaaatactgtcggtatccccagaagcttccctgaccatcccttctccttggctggcgtctcacctttgacgtctcaagttcaagaaatctgagtaacaactctttctgcctagcttctagtaagaaaaacagctgcaaaaggagaaaaacaaaacaaaacaaaacaaagagacttgggattcaggtaaccacctgacctttcttccggatctgctcctccaaaaaaggtctccatccctgtcagtgctaagggctggatggttagttgttatggagacgtggggcgtctttccaagacgccagcaaagttgatgcctgcagcgctctggcaggtccctctgctctgcagggctcttctctccttgcagttggcagatccttataataagagacttctgagatgtaaaaggaactctcccctcatgtgaccttcatgccagtccccctggtgccaccccacctcagtgcagtagctgagcagtaacagagggacagccagtttccctctgtccaggggagattgtgggtcttcaggtgagagtgtggcggcactaacaacagcctagtcacaattcattagtaaacttggcattcaggttactgacatttttgcaaactgcactttctaacaattaccctctggttaaaatctgtatttgtagaaggaggccagtctgaaaaggaatgaggggaagaacgacttcccctggagaagtctgaatgaggtggccctctcttctaaaagaaaggtgtgtgccttttgagatttcaattattgagccacttccatcgggagctcttcaattatttatactgggtgtgttgcaagtagattcaccaatttagaaagttgggggaaagaggggacatggtaggagggaggcccccgtggatgcaagtgtgtgggcaagtccttttggcttcctcttggctctttttctggatccaacttcatcgtagggctggaccagccactttgtcaagggtatcctcctcactgaggtctggagatggggacagggtgtggatgcccctgggtgtagggaaccgacacttccagacactcggtgagctctgtctgggtggaaaacctcatcagaagccagattgaatcacaccagtttctaagacattcctcaaccatgttaggcaaaagagtcccccactgacaagctggggtagaaggaaacctgatataattttggaaaaaaaccttacttgagaaagaaggttctcacagctgccgagtctctctcgacgtccagggttggaggggtcccaggccatggagagaagattgatgggtctagcggagccaagtagagagttgaggctttgcagggccaggcgcttgccatccttaactcccattagggatcgagaaggaaaaggagaaggagttctctgaatccaatggaaaaagaagtcctgtctcctttccctgggctgttgaattgtttttatttcacattagcaactgctctggactctcttgtgtttggctgctgtgttggagacctagatccaaactagggtgtgtgggaacccagggacatagaggctgaagttttggaacccagccagttcttccaaggggtgaggtcagaggcagagtccagggagcagggcagctctgggagcctggttcctcaggctgggctgtgctcggagcggtagatcctgactgccgctgtatgcctggtaacctggccatctttctgcctcccaaagtctgtctgtcttgctagcccttggtttcctgaatggggatcatcttaagtgtggggaaaggctgtctgacgacctaattgggacagctcttttgacccgaagccaagccccatccaagttcagcaaatggaagaagcgggaacatgttcagttggtgaggtctataggcacagactggattaggtcctaaatcatggtggaaattttcctggcacgggacaaatccttttgtaaacaagaacattcatctttcttttgactgacatgcctggtagggcatgtgcctctcagaagctccatgtcatctgatctcatttgggatttagtgtttttatttgaaaatgtagctgccctgaggaacagcagttaggagccaacccccagtttaagcttcaagtcatggaaactggcctggtttacccagacgtcagtgatgcctgggaaagctcttgcttttccagtgcccactgagcagagatttaatttactcaatcggtacgtgtctgttaagcacattgctgtatgccaaacactttgggcataaaaggtatataggccttgccttcaaggattgtccaggctaactggggcaatgcaacatgcatggaccaaaagacagctaagtacctgtcccatgtggaattgggggagcagatgtgggccctggagacaggacagggagagctttggggagatctagccaggaaggagaacttcactgcacctctgggatttgatcagggaggatgaagatggttggggagcaatggggagagcatcccaggagtgggaacagccagcacggaggtgtggcagtcaggaggaccaagtcatagccgagaagtcaggtggaagagcaggtcagtgacgagtggggagggcagccggcagcctcagctccaggccttgaagatcaggccttgaggagtttgacttctatgcttagggcattgtggacttggcaggatttttgagattccagaagatatgagcgaagagtgaaaacaaagcaggacagaacaaaaaacagaatttcttcatttattatttcagtgcactgtgaaatgctcaccgtgtgctaggtgctgttcaggctttgaggatgtggagtgggcaaatcaggcagactctgccctgactgctagagaataagcacacgtgtgtgatgaaggtggtagtggtgggaagcaaagaacagcagcgaaggggatgaccgtgttcccttccgtgtggggcactgggctgtgacttacattgctctcgggttactcatctttttactccaaattgcttggagtcctctgttgactctgaagggaatattcaaccataaacaattcatcctatctgctatctgtggttgaattctttcttcccagttgccccttgggtggtggcttggggccacggtaacacttgtagtatttcccgggaggttgttatagttctgtgcatttcctgcagtagtggtagtgaaggcattagatgccaggaactcaggcggttggtatggccctgagctctgaaaatgcttgccttcccctttcccctattgtgtgggccagcagcttgcagagctcctccagccctgagagaccatgcctccatccctcagaccctacctttcctggccccaaggctgcctctggctagtgtgacagacacaccctgggcccctgaagtctgaaagccacatttttcgaggggaacctggccactatgagtgtggaatattggggccttaaatttcctgcctgtagaatgaggcatttgggctaggggagtggttcctagactttttgtgggataatcaatgaatttttataaaacagaatatcacaaggccaccagctttttattttgacaagcaaaaacataaaaaaagaaactgtcaaatgccagctctgccaccattgtcatttcattaaaaggacatgttaatacccaacaaaggagtaacgatataatgtcaaagaaaaggacagttcttcctgggagaggcccttcatcagttgtcttccactgacacacacagtgcgctgtactgaggcttttcattccgtaccacatcaggggcagcactgccctgtggccatgcaggacccatgggaacagagcacctgtgagctacctgcaggagcctttgctgaggagagtgaggctccttgggggctggatcctcctcctggtctacaggatggcaatgggctccctccggtaaaagttaacttggcacgaagatttctgcattcttttatgaacatgagggtttgggatttcctgtgtgtttggttatccatatcccagtctgccctgatgagaaacaaatgtaatttttgccttcctgctgggcccctgccacagttttcttgtctgggcaggtcttgagctgagcttctggggcaggatgggctgccctgcagactggcagctgagtctccgagtctctgatggacagcaggctgtcttggaccctgccagggtcatcctggctgaggactctactaatccaattcaaagtctctatggctctgatagtggactctggactgtcacttatattttccaattttattaagctaattgaaagagaaggagattgttattttacaaatacggcacattggccaggatgtatgtattagccctgaaagtttggaggttgccttactaattttaggcagcatatgtggccatttgagaacatatctaatgtctaatgagcattgtattcccaggttggatccccgtcccctagcccatttctccaactctctgtccgtacatagtggattataactgaatttagatgtctgtactacaggattttgttacttagaagccataggttgtgagatggttgtttcagtagtagtagtaaacagaattttatatggagattccatctctgttcttgcacattggacctatcccaagacagtgtggaatagagagaaaaaatatggccttcagagttagaatggactagattgaaatttcagctctgccacttacaagatgggtaatcttggaaaattacccaatctctctgagcctcatgacattcctaccttgcagccaggcgtggtggctcacgcctgtaatcccagcactttgggaggctgaggcgggcagatcacttgaggtcaggagttccagaccagcctatccaacatgttgaaaccccatcttactaggaaaaaaaaaattactggagcatggtggtgggtgcctgtaatcccagctacctgggaggctgaggaggagaatcgtttgaacctgggaggcggaggctgcagtgagctgagattgcatcactgcactccatcctgggcgacagagtgagactctgtctcaaaagaaaaagaaaaaagaaaaaaagaaaaaacattcctatcttgcaggcttcttgtgaagattaagttggtgtaaaatcaccaaggacagaacacagtagatgtaagaggggatcagtgatctcctgagcaccagttgacccccttggtcctcagggaatgggagagcagctttgaacctggctctgagaagagctgaaaaggaatctgtcctgcagcatttcccgggggagggaaatgatgcttgattgacttgcccagggttacagagctgagacagtgcgtgcaaagtaagggacttaacaatccaggcctccgggtcagacagtttagagctggacagaccttggggagtgtttacatggctccctgcatttgagacaaagaaacctgaggcacaagatggtaaggacttgttaaaggtcacctggcctttttctaccatgaagacttccaaagagtagttgttcacacccagcgcaggggtgcttctaagagtgagaatctggacagggcacccagaaagcaatggctaaaaatgcctcaatggtggagcactgtaggtccagccgagacacccagtaaactcacagggctttctgacagctcggggtaatcggttaggtcccagcttctttataagttcctgttgcctgaatctgtggacagtgtgtcccttccctaaaggtacagcccacagttagcaaacacagtaactgctaggtgaattaatcagtgcaaatgtcttaagccctgctggtgcagagtctccggggtgcagagcaggagaagtgatggcagccagggagaggttggactatgcaacttcccaggggcagaagtgaactctgccactcctgacaccagctctaggaaagacctgggtcccctgttgccctatttctctggtccttgagtctcagagtaaccacctcctccatccattccctttgcagaactcttgccatgaaaaccccagctggtggtgcccatgctatgcttgatttgcttgagctgctttgggtaatctgcctaataccctaatatgcaggattattggtacctgggagaatgcccgtggctgggaaacccgcccaggaggtgaaagaggttgctgggtggatgtcctctttggcatgggaggggggacacggaagacccagccccagcattcggggctggtgaaaacctgaggcgaaggagaggagagcagcccgcggggagggaccagcagccccagggcttcctaaggtattgaggttcagacacttctggatcttaggccaaactgtgccacaggatgtcatagttattgtcatgaaacaaagcattttttaaaaagctaacatggggccgggcgaggtggctcactcctgtaaatcctagcactttgggaggctgaggcaggtggatcacttgaggtcagaagtttgagaccagcctggccaacatggtgaaaccctgtctgtactaaaaatacaaaaattagccgggtatgatgacacacgcctgtaatcccagctactagggaggctgaggcacaagaatcacttgaacctgggaggcagaaattgcagtgagctgagatcacgccactgtactccagcctgggcaacagagtgagactctttctcaaaaaacaaaacaaaacaaaacaaaacaaaaaaaagctaacatgggcctatggacttttactcaggggatttctaatgtttttccccagaaaatcccttcactcagatgcagtctagcacagaaccataataggtgaaattgctcaatgcagaggcgcttttatttccgcggggtccggggccctgcctcctctgccctcccttggtaaccagcccccctggggcacctcacaatgctgggcctcaaggtacagaaaactgtggatttaactcaccaccccctctcgtctcccagatagggactcttctcagagaggttaggtgactggcccagggcacacagcctgtgcctggcttcatagcttctggtccagaaggcttccccctgcccccaccctttggtaggagagaaggagcccttctgcattgtgcccagttgaggacagcagcatgtggggctgctgggtcagtttcaacagacgagaggagatggggcaatggagtggccagggagagggtggggtggggctcctggcagatggaatgagtaactcagagcgcagtccatcaatgaaggctcaggggaaatggccttctgatgttgaccaggaaaatttgaggacaaaggggctgtgaggcatgaggcccttccttctctcacagccctctgggggtcaagcatcctgggactatcccatggttccagggtgctgggcagaacatccagcttccagggatgagaggggcttcccagcccctactctggtcccaaaagggctagcggagatggttttgtgctaacctgatctctcctgttccctgtcagaaccctacctcccactcaggtgcgtcaggcccggcagagctcagcctcttagtgctggagaccgctgggcagagcgtgctaaggactccaaggatacgcatggcgagggaggaagccaaatcttcctttagcagcatctgcatagagaaccgtggttcttagcaggagggcttcacagcccgtcagcttggccacgctcatttccaatgtgatactctgctccacgaagggtgaatttatggttccgggcaggttcttggcagagaaaggaactgtgtttctctgtccttgatggaactgccctccataggcacagggccctggaagaagggtcgtgatggtacaagcagtacccagaagtggcatgaattgagtgctcttcatgttaataaacctttcgtgggcactttgcagcagccaataatccttgcacatgcattctcccgtctgctgctcacactgttcccgggaggacagcaggatgggtacgtgtccctttttggcatcagacagctggatttaaattcacactgtgtcttcctgggccagctacttaacctctcatctgtcaatggaggacattagtaccaacgtcatagagttactatgatcatgctaaaaaacagtagtcgatagtataattattgttagtagtactatttactagtaatatctattctagattgtgcatggtaagaactgactttccatttgctgtagctctcctccctcctctcctccttcccccactccttccttccctcccacccaccaagatttgtcaggtgcttactctgagctcacagggattcaatattgaagatacagccataaatgaaacagacatggtgaaacccccatctctactaaaaatgcaaaaactaaacaggtgtggtggcacatgcctatactcctagcactcaggaggctgagacaggagaatcgcttgaacccaggaggcagaggttgcagtgagccgagatcacgccactgcactccagcctgggtgacagagaaagactctgtctaaaacaaaacaaacaaaacaaaaagaaacagacaaaaactctttccctcatgcagcttgcagacagcacacaatgatgaagtaaaggaagcaggtggcagacacactccggagaagacagcacagacagggagaggtcgggatgaggtggagagctcatggacaaagtgaggatgtgaaccaaagctcgagagaaatgagggtgcagccacggggatctctggagcagaggcagaggccagtgcagacagccccgagacgggactgggtctggaatgtcctggcagcatgaggaggccattgcatctgaagtggagctagtgagcggcagactcgcaggatgacaggcacgagtggggctgattgggtgtgaagacttcacttgtcctctgaatgggccaagaagccataggagggtgttgggtacaacagtgacatgatttcagttacatttttgaaaagtatttttcttcccagatggcctttgcctaaacaacttcccagatcctggatgaggaaccagtgtccaaagaactgacacgtagttaaacccgaggcagacttggagcttcaaggcttggctctaggcaggcagcagggaggggccctgggatcccctcaaggcgggcccagccagcttctcatgcctgaggcagtcatccagcaggtgtggtgcctgcagtgaccttggtgcctggttcagcttgacaggtgtcaggagtgtgcctgggggtgagagagtccaaccgggtgagagcaggtgtggcagcagctcaccctgtcagggagggtgtgcccagcatgacaggtcacctgctgagacttggcaatttgacatcctgttagggtgcagggtgacaacgggggacctgccctgcaagttgcagctgggtaggaatctgagtgttgagccctgcgttctgtgagggctctggctttgtggcacaggacttctttctccagagcagccctgcttcctgcccagaaccagaggacagtgactccacttgcctgccgtttgtaaagcagttgctttcagaaaggcaatgctctgttaccagattagggctcctgcaagaatcaggcagggtgacaaggcaggactcatccctgttcatagaagagaatatggagggtttgaggaatgacatgacttgctggaggccacccagaaaagttggacttggtccagagtatcttttgattttcatagttcttcctgccacaccacagacctgagagtcccagtatactgggtctaattcagcaaggatgagagacggagacagccaaatctgagggatggggctgtggggtcctaggattagcacaagcttgctctcctgtgctagaccagagcagctgtcgtggctggggaaggctgggccctttgaagacaagcaggattagcccttgtcgtgaccctcacacctgaacccagtaccaggctaggtggagccttctgccagtcctaggaacaccctgaactccaggttccaggctggggcagcagagtgactgtcacttgggctagatttggagcaattgtcttatcggggaggcaacaagagataagggaaacagagcaactggggcttgcttcctggcccggtggtcacctggctgggctgggtggccctgagcttgtggctttccctctgggcctcagttttctcatctgtacactgtgtgtgtggtagttgggtggtggtggggatcctcaggaattgctaaggtcccttctcaagctttggtctttgatcttgtgattcagcgggaaatgcccaaacgcatcagatgaggtttgtatcttgagcaccaggtgatggggtgcagtcaggcccttggccccaggtgacataggaagggtgagcccctctgcggccatgtcaacaaaaagtcatcgtggggaacaccactaaagggaatggggagaaggcatagaaaggggtgagggtgtaaggctgggcacagccccgtgagaggttgcctggtagggtgggtgtcgggaggggactgtggccactcttctctctggtgttccctgcctcctgtgcctgcacccttgccctgaattcctccccaccttctgatgtgggcactgaaattagatgtcactgttgccactgagaggcagctgtggcctgctttacacaaggctctagtggggagagagggcagggttggaggcagatccagagtggcctccagtgcaaggccgaatccctttctcagggagctgccaagggcagggggagggctcctgcaggacctcctctttctgagatggcctccccacgcgatggcctcacctctcatttttctccctattcttccctccatgttcctttcttttcccaagacatcttttcttgcatttcagaagatctggtggcctgtcctcctgaagctggggtagctggaggctgcagccagtggggtttctctcccttacacacacagacacacacacgcatgtgtgagcacacacacagatgcacacacacatgcacacattctcagacatgcacacacacgtacacactcacacgtgcacacaaacgcacacacacatgcacacactctcacacgtgcacacacatgcacacactctcacacatgcacacacacatgtgtgagcacacgcactcagtgatttcctgactgacatcgggctgcccctactgggaagtgcttcctgtgtaaggacagggtcctctgcagtgggaggtggaaggtttgggcgtggctgcatatcccctttgctatttggaacaaaccatttgttcccctgtgaggcagtatcctgtggggccaggagcaagaacggaatgctgggactcaggaggcagcctctccctggtcctcagcgttctcatcttaaaaatgggaggttgatctaatggggcgagtcagaaggggtctgagatgtcactgggtctggggtccaccctgtgcgggaatccctgccccagctgtcctgggtggtggtcacacagcgcctactagaagccctgcaggagtcacagcaccttgccttatagggacttcttgctcattggaggataacagtgttagaacctgcacctccttatcctccattctgtgattatttattaaaggttcactctggccagtgtgcctcccagggccactggttgatgaaagtggtgcagcttcagtggattactcttagaggccccagccccatcagcgggtgcttcatcagggcagctgtaaccactgtgtgcccgggactgtgccaagcttcagcttccccaccaccttaatgaggcggcatgtttgtccccatcttacatggaagaggctgagactcaagggttgatgggccacagccatcagcttggaagttctggagcaggtacaagcccaggtgggctctctgcttccagcctgagctctcaggctctgtgcctttttctgagagatacctgctcttagttaccctgtctgtaaaatggaaataatttcacttgcctgttggatgtattataaggtttaagcaagacaatgcatagaaaacacttaattcttagttgctggcacctagttctggcttgttcaatggtggccaacactcttataatggactctgcccctgcatgttcccagcaaggctactgaaccttctctgctttttctttggagcatggagttataatgcctgctccccataagaggtgctttggccagagtgaagtcagtggtggagagaggggcctcttcctccaggcacaagatctgtggctagcctggtggctagtctggccggctggcatcaggctttaaatagctcccccatcactcctcccagtcctgcttcccacacatggtaattaagctcacaacatctagtgtaagcaaataataacaagggcattatctccctttagtctgtgtttttccttgcctatcataaagtaattaaaataatgaatgccttgtaaaacaataggtaagagggctggcgaaatagcattatctgccacatacctcttgtgctatgaattactgatgcagttaaccactgtgactggagggcccccctgcctcccagcctttttcacgttgatttctcctctccagggtctaccaaggggctgtggaacttgggcccccaggactgaggagcagggagctatcttccaggtccccacgtggtggccagggaccagttcagaaacatcctgggaggcttgactcaaaaggaaacactagagcctcagatgtgggacgatctccctgccctcctcttttcctcacccctccaccaatgtccaatattgaaacaagcaggtggttctgtccttgggtgaagggagaggccaggagagagctgggggtgaagatccatgtctcatttcagcagtcaccgagccatactagggtagtcaggagctgtggtccccaaagtaggcttccaagcccagcagcatcagaagtgcctgacatcttggttcgaatgtaggttctgggatgggcccagcacactgtgtttcaacaagccctctggtgtgcttatgatgcccgctcattgtgataaccattgctttatggtgtcaggggcacgagaagaagcaaggggtgctgggataattgcttgaacctgtgttttgtgctattggacactgtttaatcctgacaatgcctgaggggctggcagtactgtccccatcttattgaggtcccacagcggtggcagagctggattttcccccgaatctacaccttcagttaccatggttgaccctgtatcagggcctccccatcctcctaaataccctcctgttcagagtctcacagggcagaggctcagggaccagggcaagacctaacaggtcctatctgaggctggcctgggaggcttgggcagcaggtcccacacatgtcagcaggcagcccccagatacatctgcccagtggcctccccctcctgggcctcctcttggatcattgtagctctgtggggcttaacacatttggaaagaaaatattagcgtccagggctgcaggtcccacttttctcttccccagcttccctgagccacaggcagccagagggagagaagcaggaatcgggaccagcttcctgcctgccgtggccaagtccccaagaggatgactcaccagtgcaccctccccacctgcctcccacgtgcctggcctccctctgccccgccccctttgtcactgcagacaaagcttttcaccactgtctttggttcttccccttactccaaatcacaatgatccccagtgtggctttgccttgggaattaattccagagttttaaatgatgaacataatttgctggcatctttttaaacatcttcatctgcagtcatagttgcagtgggtatttgtgttggggtccagttaaatgtacattgttagataaataataaggttttagtataagcatgtcccatgtggtatttggaatatacttatactaaaaagttatttgttgtttatctgaaatttaaattttactgggtatcctgtattttatctggcaacactaaacccagcctttgtagctaacgaggggctgatactcatagccctttctagtcattcattcatggttattgagccaactctgtcccagacactctattaggcaccaaggctgcagcagtggggaaggcagacagtaagtgaaagaagtaaatgaattattaagtatattagcggttttaagtgctatggagaaaaataaagcagaaaagtgctattggaaagaaagtgttgcaaatttaaacaggtggccagggaagacttcattgaaaaggagatatttgagcaaagacttaagggagcaggccataagtctctgtgggagaagagtattccaggcagaacactcactgtatgcaaaggtttacagtttcggcccctgtgtggggctcagttatctgatgaaatcagccttgtttcctcaagcacattttaagccagaaggggaatgtattgtctcctgtaactggaaaggtctggtgtagatttcaggcacagctggatccgggtgttcaaatgatgacatcagtagtctattacttttacttttctctgcagtggcttcattctcagggaaggatgacttttcctattctttcctgcaaatgttccacgcttgagtcttattggcttggcatggatcatgtgattattaatggcccaattgctgttggcagggggtagaaaggactccaatgttggagccaatgtgaggccatctgtcccctttgaactacatagactgagaggaagagataattttcctaaaggaaagtgggggtgctgctgtgaaaaggggcatagaggctgggtaggcaaagaccacaggacatctcccacactttcctcctccctcctcagcatgccctaatcttagacagattgcgtttcctcttgctttggtattttctttttctttaaaatgggaggagaccagaactttgggaggctgaggtgggcggatcacttgaggtcaggagtttgagaccagcctggccaacatggtgaaaccctctctactaaaaatacaaaaattagccgagcatggtggccgcgcgcctgtaattctagctactagggaggctgaggcgtgagaattgcttgcacctggtgggtggaggttgcagagagccgagattgcgccactgcactccagcctgggtgacagagtgagacttcatctcaaaaaataaaataaaataaaatagaatagaataataccatccttctttgtttcactaagatattttaagaggaaataaagaaaatattcttttttaaataaaggctttaaaaaaatcaaaggcataatttaccccttctgctttactcctatacctttaagctagtttccatctcagctggggaccccttctggctctggttctttatgggtagagcatgttatttaaatccattgttccctatgtcttaactcttgctctctctgttgccaggaggcccagaagattaacaatggctcaagccaggcggatggcactctcaaaccagtggatgaaaaagaggaggcagtggccgccgaggtcggctggatgacctccgtgaaggactgggcgggggtgatgatatccgcccagacactgactggcagagtcctggtgagtctccacccacttctcacaccaggaggccttgctgtctgggccaaggtggctttgcttatgagacgtgatattccccagggtcttctgcaggaggctggctattgggaggtgggggtgagcagcaagtgctcccgcgtggtcatggaggagaggctcggttccttgtgtacagtggtttgtggagggattttcaaggagtgggatttgcagtggagaagggttgttgggaagatgtagcacatttcctctgctaaagcacacatgcgcgcacacacacacaccctccatcatcttggagaggagaagagggttaaggaaatataccagaaactcatggaagggctacaaatgcggggatcctggggagtgctgagtgagtgtgtgtttggtggtcttcgggggatgttcttcttgtcctgtggtagcccatagggaccccctcttgcagcagtttcctaattttctgcagtgtgtgagctgggccctgtgcacggtagaaatcagtcatgctgatggtggatgcatcagtagcccacctgaggctgcctggcccgtgtacctagagctcgcttgtgtgcccttttctgatgagattgtctcctaagcccacctgcaaccagggctgattctgccccttctctgtatgtttccaacatctctctgatctgcttatatgaagcttggcttcactggctggcctcatgagcccttggtttttgtcaaggatcattactgggacaggcttatagtgatcaaccatcccagtttgcctgagactgaggggtacatgagacatgagtctttcagtgcaaaaactgggaaagtcctgggcaaacagggatgaattggtcgccatagccaggcccatgctctaggaaagccctagcttgctttcttgggtctgctctgggtcaggagtttccctgagaaggatattgcattcggagtgatttctcattgtgattctggaagctgttttgtttgggccacctgtcctggcatgaagctagggctcagtcaagagtcatttggctcatagatggaaggagtagggacatcctgaggcctgcgaggctcaaagaccaggcagggacactggaaaacagtcattatctctgagtctcacagcaaaaactcagtgaagaggtgactgtagatggagggaggtggtgagaatttcacttctcagaatccttcttggggagaactcaatgttatgtctgggatcaatatcacacacacttttgtgggaaggagtgagagaatgaacgtggtgcttgagtaatcaaaggtgctggccacacagccttcaagaaagacaggttctgttcaccgagggatctgccgtgagctgtgtgctgaagggtctggttatgaaaccatggctgatgtcaattgatggcaaaatggaaagaggggacatttaaagttggagttttggaggaggagagagaaactggtgaggtcagtggctgcttggaggaaggcagagagggagacaattcagtctggtgtgacccaggagggacagtgtctagtggggacttggaggtgacttgctgttggctgagctgtgtaacagcacctctatctctcctcctgcctcttgactgaagtctccattgctctttcatgcttgaagaggagtggattctgcattggaaacttaagagaggttgaattctgagtctgggtattcatggggacaaaatggaggtagtgtattctatatgtatggtggtgatagtgaatggggagcagcagacagtttagctgcacaaatgtgacacttgttccttccatgtggccattatagacagttctaattttcttcatcagcattgcaagagttactgaacactaattctgggccaagtgtatttgtttcagctctggagaaaacaaggaaggatcctgattctattgcaccatatgcggaagttattgaaggaatgcatggaggataagtgctatgagtacaaacacggtgtgcacttgtggagtgtggggaggggctgtaggggaaagtagggctgatcagaaaagctttcatagggaggaaagtctttgaactaaaactcccatttcaagatgagctgctttatggcgggaagatataaaaaataaaaacatatccaggcttaaacacaagaaaatgaccactaggtgggctggaatttgtgaagaatacttaataagacagaatgcatttgcagtgagcttttaagtgtgagttaggatcttgagagttaaaggagaagaaagccttcaaagtgaggagcaggaaaaacagagaaggagcctggcgctctgggaaatggggggtgcagaccccaaagtctggggaagtgtcctggagacagcctggtggggctttaaaggccatgctaaagaattttggggccaggcgtggtggcttacacctgtaatcccagcactttgggaggctcaggtgggtggatcacgaggtccggagatcgagaccatcctggctaacacagtgaaaccccatctctactaaaaatacaaaaaattagccagtgtggtggcgggtgcctgtagtcccagctactcgagaggctgaggcaggataatggcacggacccaggaggcggaacttgcagtgagcggctctgctgagatcgccccactgcattccagcctgggtgacagagcaagactccgtctcaaaaaaaaaaaaatgaatttttgaagtttgtagaacaaggagattttgaggcagggggtgttgtacagagagagctgggggacaagtggagactgaatgggtgaggctagagcttggaggctataggacaagttagggcagtaagctactgctttagtgatggcatgggagcagattcctgatgtggtcctggtggggcacggtctgcactgacaccaagcagaagatgcaggtagcccatgtgggtgatatcatggaaatggaactcattgggcccagcacacccagcggccaccttgagactctcctggcaatcacactgttgaacgcctcttgtgatccaggcactgtgctaaccttatatgttatgatcagtttgaaggggaaggacaatgtcgtatttcttccgtatctccttattgctgttgtgttgtaggggttcattacaagaaaacaggccaatcttatcagtgaattcatctctgttttacagttgagaaaatcaagatatagcaagggcaattatttgtctaaaaacattcagctttgagtgacagagccaggctagtacctgccagctccctgtctcccagtctggtgctccttttgtgtcattacttcccagtcgaagataatgccttttcttttctaagccactgacagctgtcactttggctgtgacattttgacattaccatcttttagccaatttggtcctgaggatgcttggcctgcttgttaaacatttgcatgtagaagcatggtccactcaggcctctttgcctgagcctgcccaaggtgccagctgctctctgaaggtctccttggagaaaatcctgcccaggctgttggggccatgcagagcaagtgggacctgctgcacagaaagcaggcatctcagagctccaggcggtatcctgagaataggcctgccctttaggagcaggcaggtccctgcactgaacaaagaagagatttcacaattaagtaatggcgggcaagagaaagcagcactgcctgttcagaacccaaagctgtgtttgtcttgagccgtccaaatgtttatccctgcaacaatgggaccaaagcaagaccagacagctggctattcagtttcccgtttcaatttttaatttgttttccttgatgcacgctcaggagcttggcctcctcatctgggcctctatctcacctgtctaattgtcacaggtgtgaatctcgaagctgggacatcatgagtaaggtccagctggggaagaatttgccaatacaacctcagaatatctgtaggatctcccagacgagcacatccgttattcactaagtgtttactgctcatctgtacctggcactgttcaaggcactgggcataaagcagtgagcaacagagatccaggtgtgaattatttatattgataaactagatataaggatgcagagctcaatttaagaaatgacaaatgataattgccattcaccagtgctttttatagtcaacgcctggagcctgattatccacatgataaaaattccttgaccccccggctccagatctcagaatagcctgtctttgcctcctctctcaccctggcactcaggctcaactggccaaaaacagcaggactggacagagccttctcttggagcacgtggctgagggattctacattaaagtgaacaccaggctgtcaagagtactgcttccttttatttttttcttaactaaacaaatgtttattttctgattataaaagtaatatatgtttgctttttttaaaaaaattgaaatgtgctggaagacgtgctgataaattccactgtgggatttggagtcggctcatgcggagggaaatttggatatagcagtcaatgtcgtcaggatttctcttaactgtttgggtgtcattgaggactttgttcactgcatctcatgttacctgctttatgcacagactcatgggataagtagtgttttgcaccagagattgttgtggttttcctggtgaacatccagtgagcatgctaaatcgagaaagggatcatgtctctcagtggtggctgctcagagccaagtcggtggcttatggaaaatacagagtggctcaggtttgcgctctgtgtctttgcacccctgctctggcttgtcttcatcatctctcctctcattttccctttgccctacttttcttactcctatttggaatttacatgtatgcagttatgtgttccatacatttttgtcaggtaaattaaatccccctaagaataaggtggtttctaaataaagagggcaagaaacgtatggtgtaggttttagtatagtttggttgtgctgtatagaatcataagccaaagtcaacagtggtagtcaaattcagggttggtaagtttttccataaaaggccagatagtaaatattctaggcttgcagaccatgtgggctccacgactcaactctgccacagtagtttgaaagcagccacaaacagccttggtgtgactttgttccagtaaactttctttatagaatgggagaaaatatttgcaaacaatgcattcaacaatggcctgatgtccagaattcatgaggaacttaaaaaactcaacaacaaaaatcaccaaataacatttaaaagtgggcaaaagatatgaatagtcatttttcaaaagaagacatacgaatggccaacaagcatatgaaaaaatactcaacatctctagtcttcagagacatgcaaattaaaaccacaattagatatcatctcacagcagccagaatggctattattaaaaagacaaaaaataacagatgttggtgaggatgtggagaaaaggatcacttatatggagatgtaaattagtacaacctctatgaaaaacagcacagaaatttctcaaagaagtgaaaacagaacttccatttgatccagcatttctactaattggtggctacccataggaaaagaaatcattatataagaaagatacctgaactcctatgtttatcacaacactactcacaatagcaaagctatggaatcaacccaagggtccatcagtggatgattaaataaagaaaaaaaaaatacacacacacacacacacatacacacatatatacacacacatgcatatatatcacattatatatgtatatatattacatttatatatatacaaacacacacaataagatactattcagccataaaaaagaatgaaatcatgtcttttgcagcaacatggatggaactagacaccattatcttaagtggaacaactcagaaacgaagtcaaataccacatgttctcatgaataagtgggagctaaatagtgtgtacacatggacagagagtggaatagtagtcaatggagactcagaatggtggaagggtgggaggtggcgatgagtgatgagaaattacttaatggttgcaatgcacgctatttggatgacggttacactaaaagcccagacttcaccactgtgcaaaatatccatgtgacaaaactgcactcatactccttacatttatacaaataaactgtatttatagaaatagggggtagagaaaacagttgactggaaggaataagttccagcatgtgatagtacaatagggagattatagttaacagtaatttattgtacatctcaaaatagctagaaaagaattagaatgttcccaacacaaagataaatgtttgaggtgatggttttctgttaccctgatctaatcattatacatgtaccaaaatatcacatgcatcccccaaaatatgtacactattatatgtcaatacaacgttttaaaaaaagaaacaggtggtgggccagatttgtttcacacaccatagtttgctgactcagtctaatttatccccttgttttatatataaagaaattgaaagtctggggctggaggcgaagagattctctaaggtcgagtagcaagagtgtcacactctttgtaaaggagcgttacagactcagtgatacacacacaaagataaatacaggcacacacacatactctcactatccacattgtcacttagtttctgcatgttcatattcatttccatgttgatctcacagcaactgtctccctagggaaactatgtcctgtggtgaaggacagcctcacctcaacttgggagcgacatctacactgcctagactttacctcaaccccctgacagattcaatgttttgtgtgtctcttcaaagactggtcttgccaaaatagctaccagctcctgagcaaagctagagagagcccttagaatcactctttgtagttactttccccatattcctatgctgttacatctgtgtattgctccaggaagcttacacagctaattctatgaactgaaagcatatgctacttgcttgaatgtatagggatgatttatcgatgtaagaagaaagaaaaatatcagcctctctctttatccccctaaatatgttgcatgtgtggcattttacattaacgttatatacatagcctggaccatttcatctttatctccaagggcccaaaagaaaatatgtgtcaaatatgcctttcaaataggaataatcctattggtttaacagagttaaatagatgtacattcactgatgtgctgtttgcgcatgaaattagactggttgaacccagtgggagtacacatgggcacacacataatcaaatatatcacattcattgcattcacttctgttaggtgccctatggaggttgtgacatttcccatcagtatcctctacttttctttctcagtggtgcctggtggcaaattcacacacacttctctctctctctgtctctgtctctgtctctcacccccctcatctatgccccagcttttattatattttaggcaaatctatgtaaaattcttacatcattggccaatgccttgtgtagcagaaagactagaggtttcacaggactgtacttttagtaagaatgtcccatagtgaataggtatgtcctgctctctgctattgggaatcagttggagttttattggcattgttttaacactcctaagggaggcttctgtttaaaggaaccatatgataatttccttccaggacttaatagtggttctgtatttcatcccatgcatagatactgaaatcacattatgggtatcagtcaaaaagtcaaagaagatacattctttttttactattaaacatgaaattttgtctttatctaatgaaagatacactagatttgcactagatttgttatttttgactcaacatcatttacccagatgagaaaacatgagtcagagaaataattgaattgagcagtctcccccgacaggtagtgagctgcctgttactagaaatattcaaagagcagcaggatcgcatttcatagtgctgttgctgacagttggttagactttatcctcatggctttaattaggttccatagaacactagacccacgaattgttcccggataaaaatggttccctgggaacttggatagacttcatttctcatccccctcctcgagattgccaatgcatatcagcatataaatacttacagaagtcctgcagtcagaaagcggaaaggctctgttttgcccagcattttccattttcatttccctgtggaatcctttccccatgtaatacctgtgggcatcacatagcactcactttgggaaacatttaattagcccagggatcagttagttatagcctgtgggacagtctggctcattgcctcttttgtgtggttcataagctaaggatggtttttacatttttttatttttttttcagagacaaggtttcactctattgctcaggctggagtgcattggtgcaatcatagctccctgcaacctcaaactcctgggttcaagcgatccttctgcctcagcctccctgatagctgggattacaggtgcaggccaccatgacatgctatgttttcttaaattttttgtactgatggggttctactgtgttgcccaggttggtcttgaacccctgggcccaggcaatcctctcaccttgacctcccaaagtgctgggattacagatgtgagccaccatacctggcctaaatggttattttttaaaaatcaaaataagtgtattttgtgacatgtgaaagctatatgaaattcaaatttcagcgtccataaacaaagttgcattggaatacagccatgctcactcatttacgtatcgtctgtggctgcttctgtaagaagctacaaaggcagagttgagtagtatccggagtccaaaacacccaccagcctaaaataattaccatctgtccctgtaaagaaacaattgccactccctgtatgcctgtcaatattcctcttcaagtggcctacaggacttgctccataagttacctatggcataggtaatagataagatataacatctgtccccttctcatggggacgtgtctacattcacttccccaagctcaactaagtactgcattagagatggagaggccagagccaggtgggtccccaagttccatagcagattcccagctggggtgaacatatggatttccacttcgcaaggtcaggagaatatgtctgagaattttgtagcagcatcattccttgagtttctccatccacctgcccactgcttcggcagcccccacaccccaggccctgctggcagctcagagtctaagccttacccccaagaggacccctgatcagggcctgcaggccaggcacctcagctcgcagcagcttctggtctgcaggcctcgagccatgtgctgggctctccggcacgccctgtaaagagcagctgttaattttactagctggtgtgttggctcctctgccctccccagggctgctgtgaaaatgaaggagagtttcagaaatcaaccctcagttggctccagagtgaggaagagcctcctggtccagggacagcccacttgatcctggccactcatctctggctcccaggccctcagggctctgatggcaagtgctggcatggctgttttccctctcctctgaagtttccaggtgcatgtgggtgcctgctttggccttccatcccattgtctgtctgcccatccatctatgtccattcatccacctgtgtgatccaccgacattgattggtgttccctagtatacagaactgagcgtagcacaggtcagtgggggcctggtaagcaagcagagcacttgcagcctctgtgcagtcagcagccagtccggcctgcttctgccggtcctgtcttgtctctgtccgctttgcttcagtctctgttggggcctgggagtgagaaaccctgcccctttgtcagtgcatcatgatctgaactagagctcctactcttttttgatctccatcttgctccttgtgtctcgttctcacttgattggaacaaacaaggaggatgggtggagcccatagcagcctcaaaactcacttcagctcttgcattgcctctctccctgggacacccatcttgggaaggagctgctgtgtgtggtgcggctgggcagttggaagcccagcctctgcagactcctgactcccagctccatctgtctcaggggcttggcttttaccctgggcgagtggcttcattgtctcatacctcagtttcctcatctacaaaatggggacaataatagtccctgcctcttaatgagttaatgcatgtaaaatatttagaacagtgcctctgacatggttagtgcttgataagcatggttattattatttttgttattgtgtgtgtgagcccggtcaccatgtcatggaggaaatgggctggtatggagacagacgggtcagggggtgaagaacaaatccttttctggggcaggggtagaagaacagcccttgagcctccccaaacccagacatcttccaagagtgctgagcagctctgggcagggccatctgaaaggctctgaatgccccaggcaagccctggtttggatccatccagatgatgatgtttgctctgtgcacacacttaattcaggcttgtccaggctgcgtcctctttgcagctggctcatgccagcctgactcaccattgtcaaattggccaggaaattctcacttcatatagcctccctgagctggctggggactggagaacgggctgggctctccctggagctgtacgttgtgggcgcatgtgtcacaggaaatgccttggcaggacaacagatgagtcttaaggaaaaagggtcaagtgcacttactgtggtctccgtatccacttctccctggaggtggggcgaggctgacagggcagggacaggctggtttcggagggcacatctgcaccagtatttggggaggtgggtttgatgtacattttgacaggtagtgaccacacattcattgaaaggagatgggaaagcgtgtgaggtcaccagaagataaagacccagattctactgcacatgcgaggcagctcctctgagctattcctccatcccttcatccattccttcaaacattctggagcacctgctcggggtcagatactgttcaatgtgctggacatatgttggttcattcagcaaaagctgcaaagtgcagtcatccaaagtgttgaaggtggaaatgttatgcttgcattttctagaatgatttggggtggcaaggtttctgaagtagggtttagtgataagtcagaacctgtgacccatctctcagtcccttggacaggcctgggagctcagacattctagtcctgattgcacatcctgtgcagttctgcagctgaatcccaggggcctgggcaaatatgtgagtagttggtttccctccctgcctccctcccttccctcccttgcctcccttaccttccttcccttccctcccttcctttccctcccttcccttccctctctcccttccttctttccctctctcccttccttccttcctccccactgccccctcccacctcccccactcctccctcctccctccctcccttcctccctccctcccttccttcctcgcctcattccattcctccgtccttccctccctccttcccaacccatgaaagctggcgccccctggaggcatttcaggaaatgaaatgtctgtatttgcggctactgagttgggctgggagacttttcttacccaggttttcccccaaggccttcagagggtgctgatggcttagcactccgtttttgtcagaaaaatatccttagagcctccatttcagctgcgagaaagtttgtttagcagggagactcaaaaatagagatgatgatgacaaagtcatcagcctttgtcgttgcaggggagtgcatgcttggaaagtcacactcgggaccacacgcaagctgatgcttccaagtttagtttacgaggctatgtttaggaggaggcagactgactcgtgcctacgggccccaaacagcccaatttggtgcactaaaagcctcatttttagactctgggtccagagtgaggctttttccagaaaaaaacaaacaaacaaacaaacaaacaaacaaacaaaaaacctacttcagggaaatgacaacaacagaaagccaccatttgccctaaaatttttattgtaaaaactattctctcctgtttgagtagtgagggatctaggacataacagtggcttctctggctttcttaaggaatcagggcacttggaaactcaattaaatgtacccaagcctcttaagcaccaaggctatctttttgctcatccagttaatttcagtttgtaaaattggccttgtgctgacatgatggagacggggtgagggtgggaagccagggtcctctgtgagcggaagcttgcttctctgttcacaagcctccaagggcacacatccttccctggggcatcaagggggaccattaaacctgtttgcaccacgtccctgggagagcaaacttctgggccttccttgtttactggaggttggttaattcggaaggtagatggactgggcatattggttccccactggcaggagcagcccaggattcagcaggttaacgcaaaggatcgagaaactatcaccttcctagaactgttcccagacttttagcaaacaggctgaattttgacctttttcccatttttctttttaatcctccctccccacatgttttgtggcttttggtgaaatggctgtcctaagggaaacaggacagttcattgaaaaggagagagaaagtaaagacccctttcccacaccaccttccctcagatgcagcctttgcttacactaaaaatagcttgaaacagaggctgaatcacaaaaaaaaaagtggcatttcaggggacagaggctgccagctccctggctgctgctgaagtctgttgggtttgttggtctctgagccccgacttgcccaggaaggcgtggggtttggaagtgtactgggataggtccagaacattctttttgtttctagagcaagggcctggttgtgtctgccttggttggagagtctgtccagagctaattatatcagcaggcactgatagagcctctgcctggtgttatgcctcaggggtggaaaatcacttcctgcaaaggaaaggagttgttttcaggagctccttaatccctgaggcacctgcatgggctcccagggaagctgccaggaggttattgtttcctctgaaccatgaggtgggcaacttggtttcttggccacctgagatctctccaggaaaaagctcagatcatcagaaagagagaaaacagtttactcaccttggtctatgctgtgtgtctctctggcccttggggattcatgacagtgtttgagatcaattctggatatgggagaagagaggcaagtcacttacttttatctgaggagctgcaatcagcagaaacctggatactaaccctggctttgctatcacttttctggttgaccttggacaagtcaattccctctccaaggcctcagcatctccataaatagagggggccgcagtagtttttcagtagttcgttcccttgcagcccaaaatatctttatgttttcttatccccttcactgtccttcatcagcaaaggccacaagtgttaggctcacatctactgtgcccttggccctgtgctaggcaccaggagaactgcaaaaggagagagaatgcacttttcttagctgccagagtgattggcgtgaagcagagttcatcaaggggtgtctctgcatggctctcccatggttttgcctccatttgaagtaaaatctgaaactgtgtccctggcttacaaggccccgtgagttacggtgcctgcttttgactcacctccaatgattcttttccttctttgctcctttctagagaagaagcaaagcctataggtagaagcatgtagatgggcctgaggcactgggcagggggaaggatgccgtgggaggagggggccatattccaaagggccagctcaatgagaaggagttggcttcttttgaatcatttcagccatggagctctcttttggaaccttcctcagttggaagcctctaaggggatgttgttcctagttggtatcaaacgtggtgaccccactagccccaaatttgactggaagagcctcctttccaattgagtatcctctgcttgaggagctcttgggtgagataacagcccctatcctttgctctttgtattgcttttgactgaactgctgcaaatcatggggcccctgaaagtccatccctcctccagaggtagaagcgcctccatctctgtgtacctgaaaacaataaaaggcatgtttatttaaaataatgactgccggaggcccccaggaggggctgaggatcgaggaaacattactgtggccaaagtcattttttatttctggagcaaggtagcagactcaggggggtggcaggagctgccaagctagcccccaaatttatagcaagggtgttaaacactgtgggtgatcagtggagttgacattgcagaaattccccaaatgaaaattccttgtaggttaacttttagatgaactttaaaaaacaggggcaacagaccctcaatgggctatttcaagtgtttccaatttcattaacatgatttaagcaaagactcccccttgcctccctggatgctaaattagaaaacatcactattcctctgcccttgtgcctagtttgcaaaccagtgggtttatctggttgttttccccagagttggagcactgcagctgtttccatagcactgcggcccacagggagttgtgtgttgggggctcagttgttgtcttacagaaaaaaaccttgtaaaggcaattcagcaagccacccttctagcaccaagagatacaattcctcttcccggggctgagatggagagatacagatagagagaaaagaaataaataaataaccagtttctctttcatttaactctcagaaacagcctctggtgctaattatttctgctgtagattttgtcagactttgaatcccaatccttttgccataggtggtatattttagagatgcaaaatgatataaaaaacaatccactttcctgaaagataattttgtgtacattaaacagacacattaagccatttacaagagagttgtttgttctcagggatttggaggaaatctgaatttctaattctgggctctttaataattttcaaaagaactgaggctaatgattaaacgtctttgaacttccccaggctgtcttctatcccatgatctcaaagcatttgaaaaggaatagaattctttaccttgatgaaatcagcaggagagtagaggagacaccagccccaccaggagctttgtggcagaatgggggaacgtaaagtaaagaggctcaagaaaagtgcacaaggtcactttcagagcttcagatgtggagttgaatgaagagccttcataccagttcttatttcacagccttggctgctaagacttggaaagaaggccaaagagaaaagaaaaccaaggtaggacttagttaaggatgtctataatgagattacacatgacatgcaatcttatctggctctagtgtttaaggattagaagagatcaagtctagcaatggtgaactttcatcatctttcatcagctttcatcttctgggttcattctgattgatcagtagcagctacagagaatatttggccaaagatttaaggttcagcagcaaacagtcataatggctctgctctaaagaattccgagggctgggtgcagtggctcacgtctgtaatcccagcactttgggaggccaaggcaggtggatcacttgaggtcaggagtttaagaccagcctggccaacatgctaaaaccctgtctcaactaaaaatgtaaaaattagctgagcatgctggcaggcacctgtagtctcagctacttgggaggctgaggcaggagaatcacttgaacctgggagtgagaggttgcagtgagccgagatcacgctactggactccaacctgggtgacagagcaagattccatctaaaaagaaaagaaaagaaaagaaaagaaagaaaagaaaagaaaagaaaagagaaaagaaaaaaaagaaaagaaaagaaaaagaaaagaaaagaaaagaaaagaaaagaacaattccatgactgactaatgatgcctgccatgagtgccagcttggagggtggtagtactagtgttatttgtgccttagctacctgttctaggtcacattccctaaagtttacattatgtgtgattaaagtggggcttgtccaaggtcatttggtcagtttcagacatgtctcctgaccctgtctagtatttgataccccagctgcataggttagacctcagagaaacagcaaatttgtcagcttcctgtagcagccttctttttcttttcttttttcatattgcagcctgacttcagatttttccatctggagactttctttagtgtttggagagcagagggggtggatttcagagccacagtgattctacagacaaacagaaatgcaagcacaattttcctgtttgttatgtccactctcaaaattctctttgcatgaagcacacgctgatcacagccctcccactgcaaagccttcccctcagcccactcccgggttctttctcccaatcgctgcagatgcctttccctgtgccccactcccccggcactgtaaaaagcttttggtgggggttgatgcgtcatcatttccttccatcatagcctcaccttctatttcttcctgtttctcccttaatgttctttctcttagctattcatgctcacatcttaatggctgtgcttacagagataaatacattttgcctctgaccaaaaacagtttctgccctgacttgaatttaaaagcctgccagaattgcagtggggagcagaggcagagtcctcagtttcatcctgggagccataaaagttttctaagagtttatcatctccatcaagatgaaaatgggatttcaaggcttcaaataggaaagataaataacaaggaaaactccagcttttgtcaaagcaaagttctctttaccagttttatgagtctacctgttgtgcctgcaccctggcatctgtttcactgtggtatcagacaaagccttctccaggaatttatgcaaacctacgactggatagagaatttcaggcaattggtagagcttggaagacggctgacaagtcatattcttgggccgtaactcactctcagactcctcattcgttcctcaattcttcctcttccccttccagcataatgggaattggaatagaaagccctattaactgtaaggcctaggctgtgatttataggacattataacaaacgggactatggttcgttgtacttggctatcttttgcatttgaggtggccaggattctttgtcaggattagattttgcccccttggcctcagtaaatggctgcatgcaactaggaaaggctcagccagtgtttccagctgctcaagatgaccccatgtttcctttgaggaaagcagtgctatagagcacccatgtgccactctggatggccacgaaagtgcccagtgagtgctccttggaacttgtttctgatgtgaaagttttggtgggaaactcggggagacatattacatcctggtaggaggcacgtcctatggatttgcccttgatgcttctttttccattgtcctggcttaagccctgtgaccccttccttcactcattatagcagctacatgtcactctcctcatttgtcccatctccccgcttcagtccatctttcatgctattgccagatgaattttccccaaagccagctttgcttaggtttccccatggctcagagaccttcagtggctttccaaggtctaaagcccaaacacttcaagcaaatggtcagggcccctatcctctttccaacctgtccttcttctgctctcctccatgcactccatgtgttcaaatcctacctcatctttaagatgcagtgcatagtgtttcctcctctgaatccatcagtcttggagagtattcgcatacacttgtgaatgtgacttatccactctaaaggcaatgaggctgagtggttaagagcacaggctatagagccagactggctgagtttgacctttgttctgccatgtactagtgtgaccctgagccagtgacagaagacaatcgtagtacttacctcatagggttattatgcagattacatgacctaatatttataaagtacttagtacagtagctggggcagactaagtgttgtatacattgttaataaaacatagtaaactgtaagttcactgagagtcagaaacatgtggtttaattttataatcctctttgtcctgtgctgggctgaaacaaccttgaaccagattgctgtgaaaatgaaatttgaagagagagagagagaagaaatatatgtgaaagcacattgtcatatttttattcaataatcaataattcaataatcttattgagtatctggagagaccaggctctctgttgggtaattgttgatcaaaatggaatgagatataaatcatgtataaacacattgagtatgactgtgtagaagacaagtggcaaacattattcttctcttgtccccatgttacaggtgagaaaaccaaggctcagagaatctttaatagcttaggtgagatcacacatccaataagcatctgaactgagatttaaatctgggatctcatgactcgatgacccaggctgttttcatgttaccatggtgcttctcattcaagaatgagtgaaggaatgaatgggcataggaaagaatgaatgaatgggaagatctcaaacatacgtggctccagaaagagagcaaaccagaggcttgccatagaaagtgagttgtaagtcagcttgggcaggtagcaaatccctgaagccataaccatttgtccagtcgagcattcactatggtggtgagatggggcagtttcattgcctcccctttggggaccaccttgctacccctagtgtcatacctcagtgctctccagttatttccctctgtggcaagagtggctttattttcttctcttttgggtattacccaggacaaacagtggatgtgacgatggatggtaaaggtacgtcatcattccctctttgatgtgctttcatcataatgggcctatttggaaggtttccataagtacaggaacaatgcctctccactgggcttcgtcagccaccaatgatccgagcaccagggaaaaagtctggagtgatgctggctggtttccatggcaaccacggcttgcctcaaccctgcacacatgctgccctctttccaagtaggaatgtgtttatttattattggtccaacctgggagtgcctgtgcagctgcataggtgttgtccctacctctgccattgaggtcatgttctcaactgggagatgaaatcacagctgggtgatggaggcacggtatttgctccaccaggaaaagctctcatttaggcttcagatcttgtattgtccatcagcgtgatgccagtgatctccgcgggggttagagaggctgatctagaaccattagagtcagacaccatctagggtcctgcggtgaatcgcaaactgccccagagagctgatggtgacgcacaaatctttcataaacatacagcatgctgctgtcccttggagatgcccatgagctggctgagcacgcacaagcctgagaaactttaaacctgggcagtccaacaccggtggtcagtgagcatctgaaatatgaattgctgtgtgctgtaaagctgggagtagtagtgcacacctgtagtcccaactactttggaggtgaggcaggagaatcgcttgaggccaggagttcaaggactgtgcagtgagctatgatcatgccagtgcactccagagagaccctgtctctaaaaaagcaacaatgctgtaagtggaaatttagtacaaaaaaagactgtaaaaaaaccttattataatgtttatattgattacttattgataatattttgtatagattaaactccattattaaaattaatttcacttttttctttttacttttaaaaaatatgctttctagatggataatggtgatggctgagcgaccatgtgaatgtacttaataccactgagctgtatacttaaaaattacttaaatggtaaattttatcttatgtatattttatcatactaaaaagaaagcaaaaaaaaaaaaaaatctcgaggttaagcaaccatctctccaggcctcttcttcagcagtctggcccacatttctagaagcccccagcacacctgcacatttatttcacaggtcaagaaccagtcacaggtcggtcctaagccaattgttggcataagaatgagagcaccagggcttgctcagactaatcgaggtctgcccaggagtggggccagcatcagttttggtgaggtacctgcacccctgaacaaaatcagggttctctgaatgagggagggggatggaaatgactgttaggaggcaatcaacattataatcttaaagaaaaatgtacaagaaaattaatgtatgggagttacaagtgagagcaatctgaaaacttctttcctccacttggaatatatatatatatatatatatatatatatatatacacacacacacacacacacacacacacacacacacgtatatatatgtatatgtgtatatatgtatatatatgtatgtgtgtgtgtgtgtgtatatatatatatatatatttttttttttttttttttttgagacggagctttgctcttgtctcccaggctggaatgcaatggtgtgatctcggcttactgcaacctccaccttctgggttcaagtgattctcctgcctcaggctcctgagtagctgggattacaggcacccaccaccacaccgagctaatttttgtatttttagtagagacagggttttaccatgttggccaagctgttctcaaactcctgacctcaggtgatccacccgccttggcctcccaaagtgctgggattacaggtatgagccaccatgcccggccccacttggaatattatttgtctttaaatttgcatagagttgtaaataaaataagtgtcaaagaaatgtgccttctagaaaatttagaatgacctgtgtggtttgtcttatgtttcttctggacagcgatgctgataggggctcttctcctccaattacaaactgtcatcttggacaagctgcttcactgtgtctcacttgcttcatctgtaaaatgggaataatgataacacctgtttcatagacttgttagttaatacatgtaaagtgcttagaatgtgtctagcacatagcaggagttgaacaaggatcacctctcattaggggctgcagggggactggtggctgctgctgaagccttcagaacctcccttcacatgctcaccacagctcctccagcaggcagaaggcttactcggtggtgcagagaaattaccccaaaggaagcttttcatcagaggtggctgatgagtgcctgatggatgccttttcctccctagatggtcccaagatgactcttcctagatgaagggcctcctcctgagccttgttgtagctcagtggaaaataaataaagagggaacaaaaagtccacgaagaagaaacagtttgttgggtggcgcctctcagggccagtatgatttaattgacgtcaagcctgttatgagtactcatgtggctaggataagtggcattggaagccgggttgcccagcatccttgctctcagagccccacttgatgaccttcttaggggttagtgcctatcaggaggctgttttgagagtatctgtggggaagaagggctcagatttaaaactgattctaagtcaacaattcaaaaatataaacaagggaatttgtggttgctctcacaattaatttggaccagcagcccactggagacattgctgggaaccccaaggaatgtagggatttaaaaaaaaagtcattgaaacttagaccacaatcactgggtcccaacaggctctagtgttaattcaaattgctatctattgggtagagaaagagaatttcagtgccagaagctaccatagagataccttgtagttccaccttatactgccgagaaggaaaccgaggcctggagggagcccatgatgtgttcatgtttacaccgcaagttagtgttaaatattccattttttggaaggaattttacttacatgcatattttccattatgtttataaatttccccctattttaaattatccccattccctactaattgtatctttcattttttctttataaaccttataattctctaatatactatatatactttatttattttacttatcatctatcttcccctgtctccactaaaatccaaactaactccataaaagcagggctttttgtctgggtcactcctgtatggttgacacttatttcctggaacacagtaggggctgaatgaatgaatctgttgaacgaatggatgagagcctgaatgggtctcatagacccatcttggtagaagtaagttctcctttggtcatctaattcagagaaccttggggagaaatagaaaagccatttccactccaaatgggaatctaaggtcagaaaagcacagggttgcccagggctaagctgtaaatattggcattctgagaaagaggtcataagtttggagactttgcactttctctttggaaatggaaaagtcatttcatttcaccacatccactaaggtgcatgaagtaaacagcagacacgctggatgcttggggcatcattccttcaacagggacaacagctttcatgagggttctactaggttaagtagagaggagcagatttttcaggggaagggatggcagaagcaaggctgagaagtcaggcgtgatcattcatctgagctcctactatgtgctgggctcagaaccagatgtggatctacagcttatttatgggtgcatttgagggagtaagcgtttatgagtaggacaatgagggagagaaggattaacattttctgcccgtttcctgaaatgtgtcttaattccttcctaaggaaggctgaccaagaaaataatgcaagaagagaaagtctcttcaaaggagcccagctaggggctgtagatgaaaggattcctttgtgaataaaatgaaggaaggaaactgaagtggttcagtggttgaaccactggctgaatgaagacctgaaataagggaaatgcttctcaaaattagagaccaggctgggcttcctaaagacgactcatgcggagggaggccccttgagctggagggctcagtggaaacctagagacagaaatgagatgtagcagtcaagcagaaattgaagaatgttctttatattgatacccaccatgtgaagagggtgacagtgagtgtgatgcctttagatgcacatgaaagaactttcagacgacaacataaaatttccaaaatattttgtttaacctgttcacacactttcattcatttttccccctctgagagtaactatttgtaaccccaactaataatgaacactagtgtttatgaaggatttactaaatgccacctacaataccaggtgatttttctacatcacctcattaatcctcatatccctactatgagagtaggtaccgcattcatccccattcagtggagcccataggggaggaaactgacgtgggaggctggctcagttcccttagtgatggcagtctgatggaggtgctgacccaagtggacaccaaatgttttgtattgaaacataatacagtgcagcattatggggcagggatggggagctgctggcccatgagctggatatagtcttgatgtgattttatgtcattaaggaaacaattactaagagtaacacaccctttactcctgtagtcataaatctgtagtctacttttaaaatctactgataagcttccaaaattatgggttcctttaagaaagtttctctttagttctaattttattattgttgtttgtttgattgttttcttttctgcctacatatgtctgattttctcttcacaactgcatcctagatgccttccttagtctcttctgcttctcttctgttactcttgttttctgcttctatatatttatctgctgttttcctttctgtacttttccctcttctgtctgtacccattagtatcccttaaatgcctgtgaaaaggaattcaagtgagttcttattgcttattgggtagaagagggttttatgctttaatttaaaaatggttgaggatttaatagtatttctgtctttaaaagataataacattacattgcttttttactttatttgtattagaaaaatattctgactctccattaggcagttgtccttgatagagtgggaaaaaggctcagaattccgtcaagcaggtgtatcaagaagttgctatttggtctgttgtctttcctggttattcattattcagtttaacacagaaatcattaaacatacactgttttctatggtgccaaacatcaaatgaaacatgcttaggcctgtgaaccaagaacttctagaaaccagacaattaccaagggcgtcaaaatgtctcatcttgttgcttgtaactgaacagtgaaaatgagcgtacatgtaggggccatggaatgaggattttaatttgaatcagaggatggggtgaagagcagtcatttacaatattacacaagtcatcttacaatgaataataattctatcttgaaattccacccttcctgccatgtgattataaatttgtttataattgggtaagtcccaccagtcctgtgagattgcaccatgctttatgtttgcatacagtgctttatgcttgtcaaggtgctctgccttctgctgtcttatttggcatctaaacatcctaaataccctgaaagtaatgagacctggagctaagagctctctttacaatgaggaagctgaggatcagagagcttatgtcatttgccttgactacagcaagttgctagtggctgtagacccaatgcaaaccccacccaaaccagagccccacccaaaccagggcttttctcttgaatgcatatggcaagagagagacatcccactgtccattgtgttgaaggtagaaaatgcagaatgtggcagagtgagctaacccgcttggtggccctcaccctggcaagagacagattttccttcctctccctgaagggttaagacaaagaaaatatctgaaacttttcctagctgagcctttgctccagaactcagacacttttgcgacggaagtggggcattggggaggcagaaaaagccaatacataaaaaagcagcaacctcaccacctcacctgggtccccatgaaaccattccacccagatgagtgagtcagtgggtgttcttttcatggcctgtcggctcggtggcacctgaggctgcagtgacccccagtgctgcttcaggtgaatgagcacacagagcattttcagaactatggcttactctctcagtgtatagcagtttaagtgctagggacttctctgaactcattgaaagaaataaagcccctctgtctttgtatccctagaattggaagctcatgtatttgtgatgctggaaagggcaaatattcattgaaagaaaatagctcacatttactgaggtctcactatgagccaggcacggagtgaagcaactggttggcctcaccttgaactctcacacccagactaggagctaggcactgtgataactgctgttttacacaggagggaactcgggctcagagtggatgaatgacttgctgagggttgcacagctattaagtggtctgcctccatagcctctacttcccaggatctccagcaagggatatctcctgaggcagtggctttcacactcttagaggcctggagctctgtgtacactaactgaaacctagctgctttggttagaggattggggtcaggaggagactgtatcctcatggcccagcaagagttccgcaaaacccttgggattctcagtagagcagatcaggatgctaatgccagccttctctggaagtctgtctctttgaagttgaggtcatttccaccacaccccagagggacccatctagtcgacgcctgcctgcctggccaccacttccctactggaaaatcatcatttcccatgttctagttggggaaggacccagcagctctttctctttggcccatctctcttccttttatgagccagctaaaaggaatcccccagaggtcatctttgtccttggcgtgggaaagagagaggccttgtcagcaggtgggggaggtaggaaatgctgttctcctgtgggctgaaggtcagtgaaaggtgagctggggctcctgaggccagcaggttctggcacagaagcagcccgggaggaagctgccctggaatgtgctgtggacagacctgcgtagatcccttctttcccacgtccaggctgtcccagcatctctgaccaggccaaggtcacctaggcgcaggctcttctccttacctcacagacaaaaagaacttagcactgtaatctaagtgttcccactcctcatttgaaaagggaagcatttcatttttatgtatgtatgtatgtatgtatgtatgtatgtatgtatttatttattttgagagggaatcttgctctgtcacccaggctggagtgcagtggcacgatctcggctcactacaacctctgcctcttgggttcaagtgattctcccacctcagcctcctgagtagctgggattacaggcatgcgccacgactcctggctaatttttgtatttttagtagagatggggtttcaccatgttgaccaagctggtcttgaatacctgacctcaggtgatccacccaccttggcctcccaaagtgctgggattacaggcatgagccactgtgcccggcctcattttttttttttaatgaattaaaaaaaaaaaaacttatgtggcagttgataaaataattattttgaaattagccacttatcttctagaaaaaaaaatgtttgttgctcttctgatattggtaggagtttcttcctcttccaaggtgactttttggataacaccctgaggggactacccttcatcctttatctccatcgcagccattccaggccttctgtgactcctgggataaaataaacattagtgggcactgttccattacagggttcccttttggtgtgttccattgttatctccccctctcccccaggacctattctcccgggaaatgataaacctgggggctttagtggtggagaaggtctacagagcccaacctcaacttaaaatttccccagcctcttttggaagccaactaggtacctgattttcctgagtgggacacggcagccccctgggtggtcatagcaccacagtatactgttttacttacctgtatctcttggccatgccagcagcaagagcctcttggacctagaatgaccaaggaccgtggcctgtctgagttttaactctggatttagaagattggggatcttgtttcagacatttactcatcaacaaataccaagttcattgcaggtagggttcttggaaggtaagctctgacacgaagttgagtgtgctggaggctcatacccacgggaggaggggaaggcagcaggactgtgcagaggttgagtcgtgatgcaggctggatgcagccacagccagccccaagagcaccaagatggcctgccagcattgtgctggaatgagtgctgggatgggctgacatgggcctttattccatcactcccatcactcagaggaggtgggctgcccctgaagggcatgacctctggccaggtagctctctgcaactgagcaagccctgaagaagctgctgacaaccctctcacgagctgagcagcaagtccttcttgaagggggtctgtgcctgtcacaggattttctcaatggctgaggcactgtgttgaaacatggcagatcaagttggaaaggcttggtctctgtccatgaagtgcttgcagtgctgttgccctgactgcagtgcggtggatgctattatggaggactcttgtggtggctgcttggtagccccaggcaggcaccaggtcattaacagccgcgtgaattcccttgtcactcctaggagatatatacctgcacctctgttttgctgaagaagaaagtgaggttctgaagtgttgagtagctcctaggggtaatacggccagctgggaaagatgccaggattcaaacttaggtcggactctgaaggcagtgtgctttcctttattcataattgcctttgagattgaaggcagagccaacaggagcaggaccattgtgggtgttcagcagtgtcccctctcctacccttgctcatacccagttttagctctgtgcctggactctagctgtcccccgccaatggtgccacagctccatgccttttctgtgaccttcaccactttctctgcccttggggcttcctcttcctcttgacttttctcagcacttaggtgttggccataactgtttttggatgactgcattgggtaagtcccaccagtcctgtgagattgcaccttcccaaaaggcaaggaagttgtatggaaactggtttaggccttgtgtgagattcctttgctaacagtccaggaagctgtgtctggggcagcttccttcccccaaatatagatacttctccaagcttcctgtctggaatcagggtgttgtgaaatgtgggcactcattcagtcctaggggtcatggggaaccctaccagctttcccattaaacccagctggtaaaatggactcatgtctgtttgtttttggggtttgtattccctcctacctaaagaaactgcaagagaagggatagaaaagaccaaggcatcagcaagtctgtgcccaggagtgcaataatccttgtgtttactggaaggggaggctggcattgaacccatgtcaagataggtttggagaaaacccaaagatgccaaggccttgccttccatcccctgtgatctactacttaatcaaatagccaaggatgtgttaagagggagaaatgtgtaaatgtttagagagcagtgagttgtgagctgtaaatggccctggcatgtttataagaaatgagcaggccagaaatgaaaccccaatagtttttttgtgtggatagaattaccaaactgatggatggagggagtgttctggttgttaaatatttgggccttgggagtcttttgatgtagcaccttgtgacaactgcttgcaaagtgagctcagactagcttaaattagctcaggcccacatgttcgggaagggaggctggagtagattcccgccatggttgtttgcagctctcccttctaagagttcaggactctggtagtcagagcgcccaggcttggccagatcagggcacctggggaagggtttgtctctgcctcttactaccacatgaagtactcagagtctgggtgattgtggacagggcttcagatcaaggaaacttaagattctcaatcagccattgacatatgccaagaccaatcaatctttttcatctcatctcccattatccacccttcccacagccataaccacccactggtcactgtgcatgtctccctcctttgtcttctggtgtccctgccatggttccttcaggcaaagatgcttcttcaacctatccctaaataattctgcttgaaccttcagggtcaagctgaaagtggtacctttttcacagtcttcctgggcccaccaactggaagcaatcactgcctctactaaagtccacatcaattaaatagtcaattagatagatccagagtgaaaatggaaaccaccttctttttgcatcagtgggatggatgactggaaacatggatgaccagacaggtgaaaagaagaatggaaggaaacatgagtggaaggacaaacatagtgtctcctcgttaaaaaaaatactgtttcagctttcctaacctcacctgtaatagagctaggaacaatagccccatctcattatgtgagaattaaaatacttagccccaggtatgaagcactgtcccattattgttgttattttggaaaataactccgtaagatgttcaaccctatgaggaaattattctttttaagattcaggcttaaaatcaaatattcctggggcttgtaatttcccatgcagacctacgccctcatgttactgttgaagaaactgagtccagaagaggggagggagggacttgctcacactcccagagttggtggcacctgggtggcaaagtataattttcaaaaagttaaaattgtgactcatacaaatctagaatgtggacatgtcaaaaatgcatttagctcattaatgaggaaaccaacaagatggcagcatgagtttacataggcactggaggaagagtgttggaatgagattgctaaattagaaacaaaactggttaatgtcctacacgggagtcaattaataaactttgagattatcttttctcctgaacagaaaacatttgtatttctactaggcaaaatcctacacattaatgtgtaacttcacataatctggctatttagttggtagcaaatatcaagtcaacaaaggtacttactttcctctaggtaattaaatatttcttgggcaggctgttaaacattgctccacagatgaccttgaaaggacatgacacatttccattccattgcttgacccctgctaatagaaccaagtcttctcacccaagctgctcctctcttcctcttccatctctctgctgcatgcagggagcctggtgccttgcttccattttctcattggaaaaatgagggccataatacttgccttctccaccagactaattatgtccagttatgacttggggaaccaggcaagcgcatggaagaagatcacacaatcctggatccggaagaccttggcatccaagggaaaaacaggtgtgggcaaacaattgcaccaacatttggcaatggctgtggcaggcaagagcaaaggactgcggcgcctagagagaggagtgacttggctgagtaaaggaagagaaaaagattgagagaggaacactgaactgggatttccaagacccgtagatctgttggtgaaaagggagaagggcatggtcagcctggtgaactgcagatgttaagatatagggactaaaaagtaaggcactttccatttaatgtgcatatgctgagcttttgttatgtggcaggttctgtgtttagccctggggagtggcagcgatgggaacaatcgtgggcaaaacaggaaacaaattctagtccttttggagtgattccaggaggatgggggtttgggtggatttgagaggggaacaagggaagtggagtggaggcaaaagaggctggagagactggtcttgcactgagtgatgatatggttgatagctcctgaccaaacaattaatctttgttcagaactttccctttggaaagtctgtggctgccttctggggaaggcaaacaaatgtgaactcaagaagtttacaatttagctagggaaacaggatgtgcaaacaggaagaaccaactatgtgaaggtaggtaagataactgttgactccatgctttaaggaaaggagagctctttgtggcttgggtggtcagcaagaattttttaagcagagatactcttgattgggttggataaataaaagagcaaggaggacattgtaggaggggaattgctcccagcagagcctagaagcagagagattttccagggttcccaggagaagagattgaataagtgcagtgggccatgtggtgacacatcttgagtgtccagctggagaactggaagtgcatatcataacaggggtggaaaactcagaggttgatagggaatggtgaggttgcaatgaggggaccggtggggactttgaccagtggagcaagagtctttccagatgaagggagcagctgcctcacagctctggccagctgtggacatttggccagtttgtaatttgtcaaaagaagtcagaaatctgcattgttgtgaaatctccagattttttacatgttgtcaatttaattaaaatattaaaatcagcccaggggtcaagactgctgacccatgcatggggcctggggggaaacttgtggggctccagcttgtggcttctctgttggcggtgcagctgttgaagattcctacacacaggtgccacaggggaagatggcacaggaaaggagtgtggacctggagaatcaagtaaggagcaggcagcaactgaggcagggccatatgcaactgtggccaggggtcacatatcatactgagcagagttcaccttgcccgagaaccacaaacccaggacaaatagaagggaaacaaaataaaggaaagggagccagcgtgtctcgttcagtgttgggtaagtagtatgaatttggtttgttttcctggctgtctttaaagaacgctgggcggtgctagcctgtatttctgatgagaggaaggggatttaacctgtggttcaagtgcacttatttggatagctcagagtcttcatatggtgttgttgtgcaaagagcactggactagaagttgggagacctggattacaggaatgactggtgttagctgagtgccccactgtgtatcaggtattttgtgcacattttcagtaattctccaaacaaccctgtgaagtagagggcactgtgactctactttttcaaggtcaaggtcacagagttggtcaatgcaaggctgggattggaatgagacttcaaaggccaagtcttttccagtagaccccgctactgcactggcctatgctgagtctctccacatgctccatgttacctgttgtgtgaacttggataggtcatctaccacagaggagcaagaggggaaacttcttcagggtttgcttggtccagtctcaacatgctgtggttctgcagttgagatgcatgttgaaatgcatttcatttgtatgttgactttttttattctaaaggtctttggatgtttaatttcaaacaaagagctagagattggagaggcatcaatctcaaacaggcagcggcaggggtgtttagaatgaacttgacagccctgcaagaaaagatgtgttcttatcatatgtggaagggctttttttttggtaggaaataggtacttggacatgtaaaaatcaggcattccagcatggctgtccccaaggcccccacctggaggcttagactgcagcttctgctgttttcatatctttctccccttttatcctctctgaatgtttccaaacccccaaaggacctgcaactttaaagagaaatattattgatgcagttgaatctatttttagcctgctggggttggtgcacatccaaagcagaagaatttggttttatatctattttatctacatcaacacttctttacctaaaatccattaaaagataacagaaacagagctgacttcagacgacattcaattggttcatattttggggggcaatatgtcatgccccaccttgctgtagctgagacatgcctttaacatttccaaggagccacagaaaaagacatagaaaaccttcgattgcatttagagattagaagaggatttttctcctaaatatggagctgtttccttgactcagcaggtatgtgagatggatatgaaagcaaaagatgttcccttgccatgaagcaagtatttttgagtcatagatcttattgatcagactcattcaattggacatttctcttgtgtgcacacatgttccctctctcctctgtctcctcctgcctcagtaacttgtagagagacttccaaaaagagagcaggtttttagagttgagagttaaaacttctggaatgttgttctagctcctggggttgggcagggaaaggtaatcctcaaatataggtggggcctcagaggaagtttggtgaatctgtcaactagaattttttcttgaaaattctcattgaagtaacctctatcctcaaaggattccaatatacatctagggttgaaaaggaatgaactgatggccttaatcagattgatttaatgagcatagggccagagccacaagagcccagactgggtttagagtagaggttcacacatggctgccagttagaatcacctacaagacatagaaaaaattccagcacctaggtcccccttcagagattcttattcagttggtctgagtgaggtctaggcttccatattttgtaaatcctcccagatgacttcactgtcatttccactctagagctgtgcttcccagactctaatgtacagggaaattacctgggattcttgttaagatgcagattctgaggacctagagaaatggcaagacataccatgttcatggactggaagactcatcctagtaatggtgccagctcacccccagatttctctacagatttaatgtaactccaaccaaaatctaagcaggactgtttgcagatataaacaaaccaatttctaaaatttatgtgaaaaggcaaagcaactagaataggtaaaataattttgaaaaagaagtgtatatttgaagaaatcaccaatcgccctacctgattttaacacttgctataaagctatagtaatcaagacagtgtcatattggcaaagggatagacacatagatcaatggagtagactagagtccaaaaatagacctacaacaaatatggtcaattgctttgatagaggtacaaagacaattcaatggagaaggagtcttttctacaatggtcttggaacaattggacatccaagggcaaatgaaacaaaacaaaacaaaaagctcaacctaaacttcatgtcttatacaaaaattgactcaaagtggatcacagatataagtgtaaaactataaagctttgataaaaacacataggagaaaatctttctgatctgaacttaggtaagttagacatgaccccaaaaagatgattcacaaaagaaaaatggatcacttagacacgtcaaaattagaaactattattctgtgaaagatactattatgagaatgaaaagataagctacataatgggagagaatacttaaaaatcacatatattacagaaggctttatagccaggatatataaagaactctcaaaattcaacaggaagagaacaagctacccaactggaaaatgggcaaaagacttgaatagacacatgatcaaagaggatatttggatggcaaataagctcagaaaaagaacatcagcatctttagccattagggaaatgcaagtgtaagcaatgatgagatgtgaacacacctattataatggctgaaataaaaataccaacaataccaagtagtgatgaggatggggggcaactggaactctcagacattactaatgggaatgcaaaacaatgttgctattcaggaaaacagtttagaagttttcttataaaattaagcatatacttagcatattaccagaaattcaatgtctagatatttaccctagggaaatgaaaacttaagtttacagaaaaaacattcatatacatgtttgtagcatctctattcataattacccaaaactaggaagaatctcagtgggtgaatggctaaaacaactgtgatacatccttaccatgaatacatgcagtagcaaaaaagaatgaactattgataaaagcaacaacttggatgaatctcaacaacattttgctcaattaaaaaagccagcgttaataggttacatattatatcaatttcatttatgttacttccttggataggtaaaactgtagtgacagaggacagattagtggttattagtgggtaggggtgataggtgtgatcataaaggataatgcaagatagtttttggggcagagttgttctgtatcttgattatggtggtggctatacaaattgacacatatactaacattcgtagaactttacaccaaaaataaaaaattaaatttactgtatagtaatttagaaaatgaaacttttgaaaagtgcagattcttattcaagaggtttagcaatggggcctgggactctgcatttcttataagctcctgagtgatgctggggctcttgggaacacaagtggagggggttaggctctacagaggaaacatcgtaacatgcagattcagctcatttcattcctacgctgagagacctttaacggatccatagttcttccaagataaaattcaaatattttatcacttcaaaaaacttaaagtaagctctttcccctgaaatctcccatatccctcagatcataccctacagcagtgtatattctctgctttgtttgtggcctagagtgctctctatccacccattccctggaggatgagtgaccccttagtcactggccagcttgaaaggcaccttcccagggaagccatccccgaccctgccagtccctgacacacccgtgcggaatgagggtgcaccttctaatgcagtatgcatgctattttgctctcatgttctttcacttttcagatgtttctctccctaggaacacaggcttttcaaagacaagatctatgtcttgtaggcccggtgaccagcatcatggcaaatagtgagggttgctgaggagcttacagaatgaagacaaactgactttatagaaatagtgaatgtttcagaagcaggaaagtatcctcttaggaactatggggaaaataatgaaggacattcattgatttccaagaacagaagatgccagggaaggaaaacagcttcctccacaatctgtgctgcccactccatgcaggagatagggttcatccacatttgtaaagaacatgtgtgtgtagagtggacttgtaatgtaagcatcacttccatcaccaccaccatcatatctccccagtatcaccatcatcttcaccattaccactatggaacatcagcaacattgctgtcatcatcactgtcatcaccaacaccaccctcataccatcatcatctcaatctcttaatgttattgcaatttgtgtggtgtaacaaaaataataatgactccaaaaatgaaataataaaaatgttaaaaagcacatgtggccgggcgtggtggctcatgcctgtaatcccagcactttgggaggctgaggtgggcggatcacctaaggtcaggagtttgagaccagcctggtcaacaaggtgaaaccctgtctctaataaagatacaaaaattagctgggcatggtggcaggcacctgtaatctcaactactccaggggctgagacaggagaattacttgaacctgggaggcggaggtggcagtgagctgagatcgtgccattgcactccagcatgggtgacaagacagaaacgtgatctcaaaaatagaaagaaaggaaggaagaaagaaagaaagagaaagagagagagagagaagaaaagaaaaagaaagaaagaaagaacatgcatagtacctgagaatttgcaaagtgcttccttggaattaactccagctgcataaggaggatgcactgaattattcacctcactgcagtctgagttttattcttttctccaagcccttatatattattgtctttggatttcctacatttgtgtggggatctaggctggaattcttctgcccatcttgcaggtagtataactgagaccctgggaggttaagattatagaacttgttagtgaaggatcaaggaggaagatggtttctaagtagggcccaccaaagtgccagagatctccatgagaggtgtgatgagtgggctgaaccatcacagagcacaaagcacaggaaatcggttctcagaactcatttgggaagtcagcggcaagttcacacaccaaggtgaaagcggcactataaaaggatggatggaggtacagtaaagaggaagaggaagaaaagaggaaacaaaacgtggccataaagtgtagcttctgatacatagtgaagggacagaaggtgaatccttgtaaagtggctagcctgtcgggagccacactatcacctgctccaagttacccctcctctgcccccaaccaaagaagattgtgcatgagagttctaccattgattgagagactctctaggatcataacatctggaattcagtcctgctttagccatcgtctatggtagtaagtgatcttgaagaagtcaactaaagcctcctcttcagaaggtccccagacaaagtatctaggttgctgaaggcttgggagtggaggatgcacatgaattgccattgcctgtcttgggttgggttgtggtacttttgaaggagacagtgacaaggtggctttgtttcctagggtggggtgctagagagtgagattgtgatgcttgtcatttggtccaattgctactgctttcagttgagcactggtgaggaaccttagttgattcttctatgtaaatggctcttgcacctcaattttcttggcaattactccccagctgtgcccttcttgctgcataaaacctcaatcaatccttcattaaaatgctacagaaactgaaagcttttcccccttgtttcctaatttttccccgagtggattggatttgttatgactcaaatggaaaaggactagctttgtaagcaggttcagattctagcccggttcctatttatttatagcccaaattatttcaacaactgctgtccagtaaaaactctgtttaatcagaggcaggtaaacgtgccaatttcatctcattgcctaagtagtctcctctgctgtggaggaggaggatgccactctgggtcttgtcccaggtgctgtggggctggggaccaaggcagttctagactggctacccattcaggcctggccactcaggttgtagccacttgtgtcatttggtaggaaaagtgagaagttatgagccagaggtttcaattatggttttgccacttactgattctatgacttataaggttacttagcttcttggggtcagggttcactcatttaaaaatggtgatgttactaactacaaatataaatgagttaatgtaagcctccagtcacagcttggaagacagtgttttctttctctttttttcttttcttttttctttcttttttttgagatggagctttgctctgttacccaagctggagtgcagtggcacgatcttggctcactgcagcctctgcctctggggttcaagagattgtcctgcctcagcctcccaagtagctgagactacaggcacacaccaccatacctggctaatttttgtatttttagtagagacagggttttgctatgttggccaggctggtcttgaactcctgatctcaggtagtccgcccaccttgacctcccaaagtgctgggattacaggtgtgagccactgcgcccggccgcacagtgatttcttaatttatggttcatggagattataaaaattggcattttaattataagtgattgaatgaagtcagacattggagaactgaataaatggacacatttattcaacaaaggttgttgaggatctgctaggtgtcaggcattgtgcaaactggtcgagagaataagatattctctctggcttcatagagtttacatggtcagagagcgaggacaataaacacaaaaacatatcgtcatgcatattgacaagtccattttaaaaagaacagggaactataggagagaagggggcaggagtgggaataaattgtactgggaagcagtcaggggagtttttcttgaggaggcaacatttgagctgagaccagaaaagggagcaggaattaactggacaaagacggggaggagtgtatgtctcactacaaagcaagaaagagctacgcacagtcaaggaaggagaagtgaagccagggagtctgaattggatggccaagccagtgactggcatgaaggaggctggagaggagggcaagagcatgtgggctttgtgtgccagagaaagtattttacatttttgcataggcaccatggaagtgttttaagcaaggaagtaatgtaattctatttactaggactagatgaagttgaattgaataaaaggttactaagggtgcaaatgccatttttatgggaagagcttatgcactcaccctgagggctggcataaggcaggagtggcattgagtgtccttggctgttcctggctttggtccctgctgtgtgctgcagcctcagtggctgcagattctgcccatctaaagccatggactttcccatgaccagggcccattttgcctttgggtctgagaatccccaggagtgggaatccagaagatgtcagctctgtggcctgaactggaattccaactggatcatttcattccactattgattggaagaggaacagtaaagctgtggtgttagctggagtaaactggagttgagaaactcactgtgtatttttcagaaaaaaaaaataataataattcttaacaatctcaaactactctcaatattgtaagtcaccttgacagcacgaggacttgaatggtttgcctggagggctaacgatcttggctctcccaggtgcctgtccgcattgggagacggcgcaagctaagccagctgtgcatctctcctattatatcatggaccaggggaccatagacattttgaaagggaatgtatctgcctctctcacacttcagcctgcttgtgggatggcttggcccagacagcagcaggcactatgtcttttctaaatgttctgcctcttgatataagcaagcggtccgtgaagagatttatcagaggcccttgtgatggatacatgtcttcttataagctgatagtccaggggagactcctaaacaacaaagggaactgaaggcagactggcagcaattctagtgtcctacaaggctgtggcttgtcctgtgagctggacggcggggtctgaggcaggacgtcaggcagggccatgctgagagcatttcacatttattgaaagcctgctgtcctctgggcactgtgttttcctcttgccattccatttatccctcccagtcatgctccgctttatggatggagcagttgaggctcagaggggttacataaagcacccaaagacatatgggcaggaagtgacacaacctggatttgaatgcaaatctttctggctgtttccatattgtctcacagcctatcccagcatcgtgtgtgtgtgtgtgtggggtggggggggtggggggggatagggggtgggggctggtggtatttagggatgccctcttcttaaggatgtgtcctggggctaagtcattgttcttgggggtgcagggaagggacaatggatcggaagggtctcagtttgcctctggcctgtcagtgggccaccctcctctcctctgtgatgcaggggcagtgtggctgccttgccagcctgccctcctccagcctgctgggagcctcgcgtgagacaaccgatctggaagccccttagggaggacacagcgcaggagaggcagctgaggctctaaggacagctgctatcaactgccagcagccactgagggagaccctgggcctggcatggctacaaatgggctcagctccaagggaacagagaattgggccacatttgtctgggctgggtcagaaatggcagttcctgagcccatatcaccagctcccatttgcaaggctgaggaggtgcctgggcttgctgtgtgctgccttgctttcgttcccgctttttaaggcacatatcagcctgggcagctcttgacccacaaggtggactcttctgggccagccacgggcagtggccaccctgtcctgccaggccgcagaaaggccctgggccactcccaactggagccagtgctcctggagagagcagtgacctggaccagcagacctatggatcccctcttgctcctgcactcgcctgctccttgcagtgactcggcagtgggagtgggaggtgtcagagcaattaggcggaaactcctttcgtgcacctctaattttcgagctctctgaatctcattagttcccgggcttttctgctctgccctcctgttctttgcttgcagaaaatccagggggcagccagtcaccctgttgctggcggtgatgatgagaccccaggccagtggcacagaggcctcctgggaggaagtccctgtttgggcgcccagcactgttcagggcctcctctagtcttgttctactttaggccttaccttctcatttctgttgctggagcaaaaggctctgaattcagagttgggaattctcaggcctggtctgagatttgtctgccccaatgatgatgatgatgacgatgacgatcatgataatactacactaatagtagttaagagttaccaattgcctattctgtactaggagcaatttagacctcatcacatgtaattctaacaacatccccgcaagacaagcattatagtcctttcatagatgagaacatctgtgcttagagagattaagtaactttcagactcaaacagctggatggtgactgagctgaggtttgtacccatgtcttgatgactaagcccagctgtgcccaccgggacaccttgacctagtacttctgagagccccagggtcactattcagaggctcccagagctgccagtaccccagatcattgcggctccctcatcctggcagtgaggaggctcaggcctccgtgctagtgccccactccttgattctacccgtccctccctccctgtggcctgcagagattccgactgctgctttgtttcacccagagcacctcttctgggctgagtgctgtggaaagggccaggtaggaaaggagatttaaagtagcttgactcagtttctcccctgagtttccctttggagacccgagaaacacatctgggaagtgaatgggaagatgagaagaagtaagcaaaactgggaagagtgaaggccttggaagtgcagaggatgccggtcgtcccaggtgctccggggagtatttctgtttagagtggcatgtggagggagtgctctcctggtacagcaggcgtccaggcagagtgagactctgctagactcaactctttcttcttctctgaaggaatcagagactgaaacaaggatggcttcatcagtttggccatagcctggaaagactgggaaacccagcagctctctggcccctgggctcacagacgacatagttcttggaagctgtcatccctgcctgtgatgactgacctgcctcttgccaggcttccatccttgcttcaaggcctgctaatcatcagctccactgggagatctttgcaggctgccctggaatcatagctccaggcctttgttctagaacatctgttgcattgtattgtacctattgctttatatatttttcttccttttctccaagacaagaatgtgcactcattcaagcctgggatgggctcttcttatgtgcatattcagttccaagaaatatttaaactatcactagtgtaattcagcatccataatgagtttatactcttgtgtattgaaatcagatgactttcctgtctttgtggttcatattattaatattcttcttatcgctttgctctgcttagttctttttttatacatctttgcctctcacccccattttctgccttggcattcgtttgttctttcagcgaatgtccactgggcacctactgtgtgccaggcactgttctaggtgctggggatacagaaatgaacaggaaaattgattggcttatttatttgaaaaacacagaattagggttgactcagggtgaagcttgatccactggctcaacagtgtcacccccagagctcccatctccgtgggcactcaccctgtgggttaactgggtctttggggcgccatttcctggacatgcctcaagacttccctgaatgagtggttcatctggtaatgaatgaggccacacaggctcccttatacttgtccctggcgtgggagctgccttctaaggtttcataatgagaacatgcttttttaggggagcaggtgtgtggtagactctggactcctacgctgctgtcttctgattattcccagagaactgcacctctccgctctggttgggctgaggctgtttttgtcaccccacaggcctgtgttgtttgttcataaagcagagagacatctgtcatcctcactgagcccgacagatgccacattcaaagacccagcacatgcagcagcagcggtggcagcactgtcattgcggcgctcacacacacataccgacacactcgtttcttcttcctggcggacaaaccttcctgcccctccccgccaacacatgcttccacacctatgagattcaaaatagggtaacagcagaactgcaggcctgaagcacttgctggacagtgaggacacctctgggttgaggggacagggttaaatggggtagaacaggaagaatattcctcctcctgggtgtgaacgagtctcctttgatctctgcaggaagtgccttacccaggccctgttacctttaggagcaagaacttgaggaaatggtgtgggcacatgcacaaaacatggggcttacttttagcatgaaggggaaactgaggatgcccagctcattgtgtaagagagtgaaggtttgaccgagggtggcttctaaagcaaaacttagacagatgacgacagggatgaggtggcaggatccgaagacaaagaagaaccaggcacggattcactcgtacttgtaggaggaccttggacatgttttatgtaatacagaacatttcctcttttaggattgtaagtaatatcatggtagatgttactggaaattttatcactcccaccctgtgggtcttagcaggaatcatcctgaatggtgtttgtggacttgttttggagaagtctgtgttgagggcaggggtggtaggactttgtgttcaacttggcaggctcctggagggagagagtggtctgggacaggcgttagagggtcaggccctctgggcttaaaagagaaaaaggaagaggggaatgtcttggagaaggaggggccaatcacttgttaggtcctaggcagtgtcttggtgccatgtattagaagggaggtggagggagtggggaggtatcagcctgtagataacatcctgttctaatgggtgggtgtgagaaggtgggggagatgctttgagacatatttaataatatctactacagataagtcagtgaatcccactctttaccatgtaggcttatcaaagaccactagcagaaaaagactggtctaatcctgagagtttccttggaggacttcctcttagtgtagccccacctaaggctctgggatgttggagaacagccggagagagaggaccagttctgtggctctcagctaggttgcaggagtcttgggggtgggacggaggattctcagctgattttccctgcttttccttaacatcccccactgcttgaaggagctgttccacttgcatctttttcttatattgtgctttggctcaaatatttatctggaaaaagtcctcaagaactaaaacctttctttgtatcttgaatcagatcatttgcaagttccctctgactgtaagctgattttgtgacttggtgttcccgagacccccagtccacttcatctcatctttgatttttaagccattctgtctttcttaagctgacatttgaattcctaggtggttctttctgcatttcaccagcttacagttgtgactcatcctcctcatgttgttttaagtcatgaagagaatctgaatccagcaggaaaactgagagccatcttcataacagtgaaagtttctggaatctataaaacatcaatttgtatgtagaaactgaagtttaagaaagacaagcttttctcttaatttaaattattgcgtctcatgggaaatttaattttttaaataaatcacatattccaatgaagcagaaagctttgctagatacacagtgaagatgtttgctttaaaaattgttctttattcagctagagaggaaccaggggaatacaggaagataaaaagtgctgaatggaatatacaagacaaggttttgaaatcaaggctaaattaatcatctctccctttcagtgggctatatctaagcagaggctggcagatactctctgactgtcagatttgactatgttattctctaccagaggatgctaccagaatgactgtcccagggtccatgggtgccaggatctgttaactgatggcaatcttcacctgaggaactgcatgtatcttcagggatctcttgcatgcaagtgagacaactatggttcaagctgcttaagaaccaaaaaaatggggatgggaatttgatggcttgggtaactgaaaagcttagggttaggcttctcttcaggcttagctgattccaggcaatcaaatgatgttcttcagtctcttgctgtcactggttcactcatttctttttccatctcttacctctgctttcttctgtgttggttttatacttgggcagccttcttttatgtggatttccgtaacagaatcaaatgcatatcatattggcttcttacctttggctttcaatagaaagatagattctcttttatatatagacatacagtagttccagcaaaagtcctagaactcactctcattggatcaggttggttggcatgttgcttctgaaccaatcaccacagccaggaagataggtctcatagtcttactgagcaaacctgggtggatatcactcctggagatggaaggtggaggtgggcgcattcttaaaacagagggattgagagtggggaatagggcataccagaaggggcaatgaatgctagtcaggtaaagataatagctatccactatgatatggtttggttgggtagacttgagggaccagacctggggtgacccatgtttgcccagctgatcccattgggtgatttcttcctgtttgatttcctgcaaggtacctcagttgttggcatgattctcctgccatcttgctcctggatgttgaaaggccacacggtgtctaatttaccaacacagacctgatctagaaggcaaagacaagttctatgcccacacttttccaactgtagagttaagaagttatttctatcctccaggcttaatttttggctatcaatattgagctaaagactattgaagatttacaaaattatgtatcaatttaattttactataattaaacacattttagtgaaattcctgtagcttccgttattgatatttttcacaacaatcctctgacatatacaattagccctattttacaggagagaaaacagggtcagaatggtagagaacttgttaaaggccatgcaacctggagaatccagcatctatgtgcttgtgctgggtttgatgcatttagggatgaataagacattctctgcccttgagctgtatgtaattgctctgtgtttatagttacataaaagaatgagtaatatgcctctatggaagtaaaacagaaggaagtgattaattttacgtaaatgtagtctaggagacagaagggacattagagatgggtcttgatgagtgagtaggagtttcccacgtggatattgtgtacagggggtcgttttttcactgagtaatgcgtgagttttctatgagatggagctgccagtttcaggaaatgtaatgtcacccttgactctgccttctccttttaccagaaggatggccacagagatctacattagtattagttaggtgctttcatttgcaaagactagaactcctaacacaaataggcttaaataataaagggcatgtattgtcttatctaattgaaaagcacagaattagggctgacttaaggccaaacttgatctgttggctcaacaatatcaccaaggatctggcttctttccatctctccgttctgtcttatgctatctttcatatcctttggtgtctttatcaaaggctggcaccttttaggccctaatatgactgaaggagctcctggggctagatgcttccttcatcatgcccaacaggaaggaaatggcatcgtttccaggcactttcagcaagacctgagagtcactctgattggactggcttaggtcacatgcccatccctgaacccatcactgctgccacggaacagagaacattgataaagttgatttccctgaagccacatggatccccaaatggaattttgcagactgatggaaggaggaagtggacaacggatgctatattagtccgttttcacactgctgataaagacatacctgagactgtgaagaaaaagaggttaaattggacttacagttccacatggctggggaggcctcagaatcacagtgggaggtgaaaggcacttctttacctgacagcagcaagataaaaatgaggaggatgcaaaagtggaaacccctgataaaaccatcagatctcatgagatttattcgctaccacgagaacagtatgggggaaaccaccccgtgattcagattatctcccacggaatccctcccacaatacgtgggaattatgggaatacaattcaagatgagatttgggtggggacacagagccaaaccatatcaaatgctcagaaggcatatgttttggtaaggcatcaaagaaatgtttaccagagcactgaagtttccatagtctctcttttttgggcagtaaaggttctatatagctccaagacataatctttgatgctcagtctatgacaactcaaattctaggcctttccttggataattcagccactgaactaccttttgcttccctctgtagtctcttcttagttagtactctggacaaacttgctttgactttgtccaaagacacccattctttattagtatatgacgaattttgtggacagagaagagtgctatgggcatgatggcatacttaccacacagaatgatctagaactttgtagcaactaatgtcctaggccttttccagagctgctttcttcaaatggggcaacagacgtgatgccgcattttctaaagctcttcccaacctccaaaacagcttcttttctttctgctgaggaagctaaatttactttcagtcctcaaatggtgaaaaaaaggggagcctccccagatgtctcacactgataagaggaagaaatatccaaagccattagccagtggtgacaaacagtgtgtgaattgtaacggacgcagggtggctgaagaaaagactgagtggttggagacaggcaggcaggcctgagtttcaaatccttaccctgtcactttcagcactttgggatgctgaggcaggcagatcacgaggtcaagagatcgagaccatcgtgccatcatggccaacatggtgaaaccctgtctctactaaaaatacaaaaattagctgggtgtggtggcacgcatctgtagtcccagctacttgggaggctgaggcaggagaatcgcttgaacccaggaggcggaggttgcagttagccgagattgcaccactcactgaactccagcctgggtgacagaacaagactccatccccacccctccacccccaccacccccccccccaaaaaaagaggcaggatgccatggggttgaagaaaacaggccctgtagccaggctgcctgagtctgaatcctggctctactgttcaccaactgtgcctgcgttcatgtcccagctcttccattgactaagcctggatcaagaaataatccctgagttctaatctgtcattcaggtaattgcgttcttatgtttccttttgtcatttggccttccaacttagttgggatgatggtggctgtcactttatctctttggcctcaattgtttcatctgtaaaatattgatacaagtaatgtccacattataggttgttgtaaggattaatcctcatttaactcatttacaaattttatgcattatatatgtatatattatatataccttcatatatatggaaaacacttgtaacagcatctagtaagcacgaatgatgtggatagatagacatatcttatagggttgctgtaagccctagagactttgcatatatattgtctggcaatagcagacactgaataaatcttagctattattaataattattatgttgattgaactgtttaataataatgtgattcatctaaatagagctttatagtttctggagttcttgctgccaatatgatccttcttgagccctacaaccactcagtgatggggctcctattcctctgtccagtggctctcagggaagggttggatgcctctccagggtctcctggccaggtggtcattagcaggaccagggtgtgaatcatagtgaggagcttcccagtccagggcttgttccacatcctctcttcccccattctaaaggcctcccagccatttgtcacagcctcatttgaaatgcctgtgcttctcatctgtaatatcctgattgtcccattaatctcctttaagcttcatgaaaaatacaaggggctggatcaggaaatagccaccaagttctaattttgcattcaggggattgtcttccatggacgtgaagagactgatgtttcccatttggcctttgcctttccaactaagtcggggagagctgtcattttctgaattatcaaccagtttacaaggtggcatctatattttgcctctaatgtgtctgtacttttgttgcttctctatcttcatatcatcctctccctagtagatgttctacagtactgcccagagggagtggtaagaaatgtcttttgataaaaccttaaaagcttaaaacttccagtcactttcttttgcatattccttagaccctggccataggccagtgctcactacagaaggagcagtgtttgttttgttaacacacacacacaaacacacacacacacacacacacacacaccctgtactgcaagatcctaaattttagacttagttcactgttttatatggtagccactagacacgagtggttgtttaagtttaaatgaaattacaggttcagtttctctttgcattagccaccttttgagtactcaatagccatgtgtggttagtggctaccatattgggcagcacagatagagaacatttccatcaatcacaaagtcatatgggacaacatttaccataaaggggaaagggaacgggaatgggcacatgagtgtagtgttcagttaagtagcatcacgggacaacagatgtgaagtagtcctcttaactctctgcatgtatttcctctgtgatttccaaaggaccactaaccaggagaaataagaaactgttgttttctgacccaacaccagcatgcaatgaaagtaggatatttttcattctatagagaaccgtcaatgtgtattttgttatctgatttgaaccctgcacgcggacagcacatttcacgtgttttagcccatttgtggctggcacaggtgtggccagaaagccagcataggatcttgtttgtgtttaagagagaagttcagggagactattcaggcacattgtctggcaagtctagcactggtcaaaccctcataaatattcctgtccaatctgaacttgaaatgttcttgttgtggacacctttggtgagccagtctacttgaggacaatccagtctactagtttagcttcaaaaagcatgcactagaaacaattagaagaacagggttgcttttaaagctatcaggatggtgtttgctgttgttttgttgttaaatatcaatgggttactcaatggtaatagatctaaagagatgaacattgttacatgaatattgcaagaaatttgtggatctcttggggaccctccagacctagttttgagaatgactcatataaacaatttgcagagtctaattcatatactcagactagggttctgaattcttttccccctgggaggaaggaaaaacagaggataacattggttatctggggtaataagaaagcaaggggcagactacagctgccctaagatctgagatctgagtgacagagcctagttcagggaggggctgacatgctgctgaaatgggcttatccagccacactcagagctctagtgagtatcagggtcattgtgttctaaatcatctgtggccagcttaccaaataggctggagtctggcagagaatatctatagaattttccacaaatcagaaattctggtttccagaaggataaacttccccaaatatcctggtggtcttgagttaattgtggcttcctgggagtttctgtcgttggtaagggtcacattttcattgtcccttgacctttagtcttctcagagttgactggtaacattaaaatgagcatgtcttcacttctgtcacttacaaagctcttaaaaaatttataatactttaaacatatcacagtaataaaagcaatcgtatctctttacattgttgcagtcttttggataaagtcccctgaaagcattgtcctggtggttttcaaacttttttctttgatctttcagaatctttgttcaaatgacatcttggctagactccaacatatagcacagataaaaatggagttgggactgcagggagagaaagggtggagcccagctcactggacctctgcctccacccccaaaccaccctctagcctttgagtcaaccactgagtcaccggtgagcaatccctgtggttgcccagagcatcatcccactaagtcctcataatcaccaggcatgattgtgaggtcatcacagtgaattggtgcacccctggaggtaggaaggcagctgaagaggggagagagacaccctccccacccccatatgaggatggtctgtgatgatatgcatgcaggggaagggacttatccaaggtccctgatagatagggactggaattttggcagtgtcttttctagagtagaacaaatttatcagttgaatttgctgtagttctctgaaggtttctttggccacattagaatttttgagccctggcatccaagtaggccaacttcaaaatggctgtgtgctccactcagagattctgctgtgaagactggcaggagattttttagcctattctgaactccaactgttccagttcctcttgctttccagaggtgtgagcacctggaagcccctgctctggtctacaccccaggctcaagattcatcctgctcactcagccactcatgctgtcaccagtgataaaactgtaagtgtcagcagttgcatttgattcttgcacaagaaatagttaccctctaaagacttgttcattcttgtgcctgtaaagtgtggtgtgccctatgcatcagtattcttgcctatgaaatgggcatgtaggctgggcacagtggatcatgcttataatcccagcactttgggaggccgtggctggtggatcacctgaggtgaggagtttgtgactggcctggccaacatggtgaaaccccatctctattaaaaatacaaaaattagccgggtgtggtggcaggcgcctgtagtcccagctactcgggaggctgaagcaggagaatcgcttgagcctgggaggcagaggttgcggtgagccaagccgagatcgtaccactatactccaggctgggtgacagagcgagactctgtctcaaaaaataaaagaagaaatgggcatataaatagatctacataagactcactggaagtttagagctctttaaaaaaatggacaacaaaaagtttttccaaataaatgttgattctgggcctggaaagtttgagtggctggcttctcagagacagttactaccatccatgctctttaaagttccattgctcttattctaaccttgaaatcaaagaaaccaaagctgtggtttcttgtctgaccttggctaatgattttctgattgactctacatgcaaaagaactgctgataagtttcttataggggagaaaagatgatggggagaaaaggaactgagttcatttcctaacctcagtttccctgcttactcacccagtgggttgggagccacttgctgggtctgagtttccataatcaccatagaaatggaagtaatattatccttttgcccagtcgatgggaggatggaggaatgtcttagtctgtttggcctgctgtaacaagataccataaacttggggggctgataagcacatttatttctcacagttctggaggctggaaagttcaaggtcaagacaccagcagatttggtgtctggtgagggcccgctgtctggttcatagatggcactttcttgctgtgtcctcacatggtggaaggggcaaggcagctctctggaggctcttttataagggcatgaatctcattcatgagagctctgtctccatgacgttatcacctcccaaaggcttcatctcttaatataattacattggtgatgaggtttcaacgtatgaattgggggtgggcaggcataaacattcagagcatagcaaggagaattcagggattgcattaagaaagtaagttgctgagcaaagggactcatcttcaaagtccaatacaatctttataatcttacaaaaagctttcctggttttagaattagctccaaggaatttggcactagattttagatttgctcagagaaagagtgtgagagagagagggatgtggcttttgtgaggaattccagcaccttcctttgcaaagatatgccctaaagaacagtggcggcctatcctcaggacagaagcacttaattttgtctaattgtgtcaatttctaggagtcattgggaaattcagcagctaatgaagatggccctgttctgtcaggtccctactggaatatttaaaattctgtttttcatacttatcagctaaaagaattacagaaatatatttctggatcctgtggggaataagagcagaaatatacaaagcttcttctttcaagacggatcccagcagcccaagctaatgtcacagttgtgttaaagactattgattccagcaggttctgggctgggtctcagcttcccaggactgttccaggctgacctcctttccctggttccatctttttttgggacttctgtgggccttcattcagcatgtggcttgcgggtgtccaggtctgcaggcatacacacctctcctgatctgaatcagagaacaaaagataaaggatcgaggacaatggcctcttcacttttgctttctctcttctttgggttttactttgtgtttccaacagccaatggaaggctgttctatttagggtaaatgactcagacttggtacatctcgaatcgtatgtcagagcacactgttgcccctcaaagctcaggaaaggctgcatactctatctccctcttgatggtttcctcgtatttacaagttaaagaccatagatgtcctgtagtaaaggggttagcttgcctctgtttatcccggtgattctagtgaaactaaaatgcttgtttctatggggcacagtccagatgtgttgttcacttggattgaccaatcctttcaataaagttttgatgcaaccatgtgaatcccaagttttcagcacttagttttgtgaccttgagcaagtcacctaatcattacatgcctcagtttcctcatctgtaaaaggggataataaaaagcatctacttcacagggttgcattgaggattaagtgctttaattaaggttttagtacagtttctgaaatataatgtattctatatatggtagctattattatgttagtatccattattatttgctggaatcttttaacactgtgctgagtgttggtactgtcttcttatcatgtcatagagcatggggtagtataagaatcctaccttaggtcaaaggtcacaaagccctattgttttattcccaatagtcttacagggaagatgcagttgtccttgtcttatggaggaaggaggtgaagcacacccgagcggtaaagaggcccctggtcacacagcccatacaggagtcaaaccctggcctctggctgcaagcctgccatccccaagcgtctctctaaagcttcttgtcaaccagcctcagacaggggcccacagacacgaacctcatctcagcgttggtaggaggcaccttccacttggattctcttcatgtggttaagagagtcctgagttccaatcctaagttcactcgtctctacctccttgcctttgtgcaggttacttaacttttctgaccatcagtcttctctgttgtaacatagggatggtaacacccatttcttatgcatgcagtgatgcttaatgacataatgtaggtggggttcatgcacaaggcctggtatatgatgagtgctggtaaatcttagctcccaatgacactgtatcaggctctgtgctagggtgctttacgaaaatgatctcatgtaatcctcacaacacatcaggatattggtactcttcattttacagatggggaaactgaggctctgtgggattaagggactcacccaaggtcataaagccagattgtgacattgagattcaaatcttggcaaccttactttctggaaacactttcccccttcctcttctttagacccacatgcaggctgcttgcagactctgtgcttggccatgtttcttggtcagcagggcagtcgggcaatgggcattttaatcatgtttatgctggacagggctgtcccttgggcttgaggacaatgttcttgaaccagaagaatatggcagaagtataatgccatttcaccaggacagatgcatcaaattccatcttgggtctggtaattctgccacagatggtggcccattgatatgtgcatgcttggctggggtgagagtctgtgccaatgtcacaggacacagcaaccccaatgagtctgtttacttatttaacagtcaaggtgaccagaagagacactttccaacaggacacaatgaggaggtacccagcaagtcttctagctgattgggggaagaaacccagtgtattacaggaaaatgagagagtgcatttgaatttgtttctaatctgaattttccatataaactctagttagcagtttcaaaactgtggacgcacttcagcctaagggacaaaaacaaaacaaatgacccaaggtaccagctgcaagatgctggaataggagggagggagggaaggccagtgagagggcaagattattaatatgcttttcttactaaattggctttcagaatcaaggggaagaaccaaggtgggttgttaagggagtactgatttagatgtgctgagcagttgaaatgtttttgtttctcaaacatgaaagcacttggctttgcatgactgggttttaaattgctcagcaaagcatcacttggggctaacctgagtctgtgaagttccacaattcaggaatgatggttactgcagcactcttgtgtttcaaggttcgtcatgaagactagcatagattccactgttcaattaaagcaacgtttaccatgatattcctattttccatgatgcagggtcctgggaagcatctctttcaggaagggagtatgtattcaaggtcagtcagtatatgaatgtgtctgagacttggatggctcaaggggatagagctaggtgttatctggcagtcgcaaaagtgagagatgatgacaaggccaaggtaggtaggagaatggggatccctcattcatttatcccatcattatttattgagcaccaactgtgtcccaggcattgttcaaggttcaagcacaaagccgtgttcaatgggttcaggtagaaacatgcacagttacatcacaacagagtaaaccatgggaactgcatggtgcagagtagggggtatttgcatggcagttgaagacctgtgtcggacgctgatgcttctataataacccaacttggttcctctccacttttagagccaattaattaggaaaaacactttcttccttccctctctgtcattctatgttggcatttgtcccccttgggttgatgggcagacacaggtatgaaacccataacttcatctctctgggattcagtttctgggcagagtgggcaagggaggccagggtcttctagactcactaagtcagaagcatctcctcctgatctttggtttaatttttcttttgaaggtactcagtccatgatttcagattagggaggcaccacctggcaaagggggagcctgacaatgcagggcagttctaagtaccaggcttgggaccgattctatggagatatggtagatgggactaccctcaactgaataatgtgtgaagagaatttaagaccatgcctgatacatagagggtccagtgaaagttgaaggcaaataaccctggtaaagaaggcaggaaacacaaggaagccattcatttatttattattcattcaatcaacaaatatttcttaaatatttataccaacaaagcatggaacctctagccaaactctctggtttcaaatcctggctgttttacaatatctgtataaccttgagcaagttacttaattattctctgtgcctccatttcttcatttgtaacatgggaataatcaaaaagaataaatgaagattgttatgaagactaacacatgattgttattattatctttttgttcatttatttagctgtgtccttagtctgttgcttgattggtgtggtgttggggatgtggccaacggagacaggaaaggtctccgtctttacccaccttatattacaatagaagagtcagattataaaaaaataataaatcaataaataatactttaaggtagtgatgagtgatgcaggaaacaagagaagatgattgtggagtgagtgattactacgggtgaggtccaatgatagagaggactagtgaagagggaagacagtcagtctacacaaagatcatcctgttgaaaaatatgaaatatgcaagtctttggaatttacccaaaaaaaaaaatagagaaagcatttcttgagtttccaagagaggcaagcaggatgagccaccaaaaataagtacggttaaataaagattgattctgggaccaaataagcttcaagataattatttctcatggtagtgaatcagtatgtctcacaaatgcattcatcttttcatgttttcagtacccaaggtccttgatggatggattaatcctccttttcaccttgcttccttcacctgatccctcacctctcaatgaattgaaattaaggaccgttcatttggaaaaacctattaactccctgcttgtcgatggcttactttctactcagcctggctgggttccacctcttagctcgtgagccctcacgcaactctgctgtctccattagtgtcccttgtgggctggtggccgaggcagttaggcttatgaatattccagttgctcctgtaaatttccagcatccactgttaggcaggacatgaggcactaagggatgtgcatcacttctgggctggggcaggggatgcctgtgtgtggtggtgcagttgctgtcttccctgatggcactgaagagactgtggcttccagggttgcagtgcaagatggcggagcttctgatgcctaggcccatgagtgggcaggtggagcagagcccaggctgcctttgtcttcataggtctctaacttcttgacttctcaatagcctcaatgactggttccttcctgtatttggtaggtgattgaaaacctcttaacacatgaattattcagtcttggctaggccttctcctaaacagttgtctctggttcttaaagttaccttttcctcctctctaaaataacttacttaccttttcctgccacggacactatgacctcttggttttattttcttgattgtatttggcattctctgaaattgtcttatttgtacatttatatgggatttgtgtctcctcgctagaatataactcttatctatttatactccactgtatcctcagtgcctacagcagtatctggttgaaaggggtgcctgataaaaatgtgaatgaaatgaatgccaacagccaggaaggcacctcatccccctcccctctgccaccccctttatcagggctgggctgtgtcagctcattgaggcagtagggagtatggttaggatgatggactgcccgggctcaaacacaacttcccacctgtgtgatcttagataaattcacctctctgtgcctcaatttctttatctatacaatcaggacaatggcaatacctatcacatggattgtttttcagtttaaatgagttaatatacataaagtcctcagaaaattatctgattcatagtaggggccatggaggtattaccattgtcaacagttactggggaagcaaagggcctgtcctctctctggtaaccccccgacccccttcagtctcttgagaacccggcctcaatgctcacctggggtcccctgggatccattcagcaagaaggttcagccacaccaagccctgttccttaagcccaggagacataaatccacaaagcctacaggagagatccctgaggaaagtggctattctggatggggccagaaggttctttctcaaggtcaaagctctcggagacctgatgaggccctgcccctcaagcttctgtcctttccacagccctgcagcattatttccataatgttattaaaaaccaatgtgtgctggccagatgagtgacacttcccagtgatggggctcggctctgctcctccaggcatggagaacttgttcaattatgtgccaccccgtgatgggcccaatcacagtacacacattagcttctgattatacccttgttgagtttctcttgacaggaaggaaatgaatttacctcgtgtcacctctgtagtttgcaagcaggcatggcttctgataatagcacctttcatgttttgtaagaccaaggagaagcattcgtgtggtggccagtccttggtgaccctttgtctcagcctggaggtgagcttgagctgattcttcatgggagtgtttactcctggggcttgtaggaatctggctgggggttgggtggtcagctgtcccataagattgtgggccttggccactgcagcatgcacatccctgaatccacactcttatggtatcgaggccttgggcaaatgactgaatttcccttgaccttcccttccacctgtaaaatggggacaatgatagtagttatctcacagggtaggcgtcagatttaatgagctaatagatgcaaagcccttgcatgtgcctggcatataataaatgctacattgtgtttttatcattaaaattatcttaatattattttgctgttgctgttattattgctgttgttattgcttagattggaacatgtctttgctatttataactgtgtgaccttgaacatatcacttagcccccatgtgccatgacatttgtaaaatggggaaagaggagtctgttccttggtgcagctgcaaggatgtcagtaggttggcacaggaaaggcctttgaagcagcatcagtgcagggcaagtgttgtgggttattattggtgacttgctcccctcaccagaggggtcttttgggtgctgtggagccagaggggtctgtccatggtgggttaggattatgcacttaggtcttgctttccatttgggacagtaagcatctgagagaagagtttgtccctgactataccaaattccaagttctgccaaggaatcctggggtaggccagaaagggaggcaggaatggagccagtggtggacccagcgtttccttccaaagcttttagactcagctgctaaagccagtcatgaagtggacgtgattcctgaggcagggcagcaggcccctctctcactacccccttcaccagccccaaccttcagcaacttttcctggcaggagaccacatcaccatcccctccccttcccatcacaggcatttcagaacacaaggggatctgggggacccacgtctaaggaactgtgactgagagcctgggaagggctttctcttgacctgggagagggaaaattaggcaaattgctgtgtttctccactgtaaacctgaatgggaatgagggaggagggagaaaaagccagacaaaaatggagacacatgcagagagatggagaaacagagaaaggagaaggaaagagctacagagataaggaaatgagaaaacactgagaaataattgggaaatgagacagacaagctcatagaaggacttagacccagaaagggaaagtggaaaattatcttgacagctaacacgtattgagaagacagtatgtgccaggcactgagattagtgtgtgatatatctcatttaatctttgcaacaattctatgagataagtgctgttgtcaacttcattctacagtgaaaacaacggacatacagaacggtgaggtgtctaagatcacacagcttttgtggaggagttaggactagaatccaggtcaatttgagtgcaaagcccatgtgcttaaccccctgcagagaggccatgaccctgggacctaaagcatggcagagcatctctgagtctccctgcactctggacattgagaagcactagtcattctgttttgtagtacagatgtgtttataaagagactccagggaagtcagatgggtaaggattatgcctgtcactcttttttttttttttggcattttttaaattatactttaagttctagggtacatgtgcacaacatgcaggtttgttacatatgtatacatgtgccgtgttggtgtgctgcacccattaactcatcatttacattaggtatatctcctaatgctatccctgccccctccccccgaccccacgacaggccccagtgtgtgatgttccctttcctgtgtccaagtgttctcattgttcaattcccacctatgagtgagaacatgcagtgtttggtttttgtccttgcgatagtttgctgagaatgacggtttccagcttcatccatgtccctacaaaggacatgaactcatcctttttttatggctgcatagtgttccatggtgtatatgtgcacattttcttaatccagtctatcattgatggacgtttgggttggttccaagtccgtgctattgtgattagtgccacaataaacatacatgtgcatgtgtcttaatagcagcataatttataatcctttgggtatatatacagtaatgggatggctgggtcaaatggtatttctagttctagatgcttgaagaattgccacactgtcttccacaatggttgaactagtttacagtcccaccaacagtgtaaaagtgttcctatttctccacatcctctccagcacctgttgtttcctgacttttgaatgatcaccattctaactggtgtgagatggtatctcattgtggttttgatttgcatttctctgatggccagtgatgatgagcattttttcatgtgtctgtgcctgtcactcttgacttctgtgttagttaggattccttgggcttcatgtaacagagagaaaagcagtttttcctacaagtagaagtctagatgtaggggtttctggcactagtgctgctgctacatcatgtcaagatagtgtctgtaggatgtcaggattcccttggcttttcactcatggctgcaagagagatggagagcttcagactttgggtccatttcaaggtagaaagaaaagggggaagggcaatatcaggttaagctgttccctcctgctttttatcagacatcttcccctgcagaatatgtggcgtggccacctatagctgcaagggaggctggaaggtgattattcagctttccatcttcgaggacaggcaaggttggactccaccttgggtgagccaaactgcagtgtcagccaccttccaacaaaccagcctaagcccaaacccaccagtaaccctcccctagtggagggaaacatttagttctcttgggagttgcaggcaggtctttgacttgaggcaccattctgagtcaagctgggtggtggggaggtggggtgaggcaggagtgcctagctctgcttccccatggtgttgctgggggtagatacaaacacagtcacatctgctatgtctggaaaaccaagactggagtctctcagctctccagtgcctgctttccctgtagccaattgcaaggctgacatcccaggaaaggcagcagattagatgagcacaggagcagagaggctgggaaggcggtggaggagggagaaatgtgggtttggcagaattttctaaaatatcactttattgatttggaagagacacaagagaggaaatataagagacaagtgataagaggctcagctgagatgggcatggaagagcctgccttttttttttcctttattgcatacctatggagcttttctaagcattaaaaaaacacttccttaccccctccccatgagattttaataccacagatacactgtatatctgtgtgtgtactctgtatgtatctgtgtttatacataaaggttgttttttcacttttcaatgtctgccttcctggaggagactttgcccccattgagaatacatgcatgagacacatctctagagacgcatctgggcttactgtgggaggagaagagctggtcccactttgtcaaactgtcttgtagacaaagggaattgagaagagtcttacatttcttgagcacctgttaggtatttggcaccaagacaggggctttagatctgacaactcacctgatgcccaatggcagttctgagtggtcagagcaggggcctcatttcacaaatgacatcatcaagatttaggggttcctccctcctttgaagagatccaacctgcccagatgaacaagctagcactattctgatgacagggcatggttgagtgtcagatgggttcaaagctcgtaggatgagcacagaataggctggagtctgtagtggtcctccctggaggagatggggtgtgaactgagctctgcaggacagacagatgcagagatgagaaggggaggcagcacctgctggagaagagcaggagcagaggcttagggtctgtaagggcctctggctgcaggggaggattttcgctgagagctgagagagatggaggcagagccatcccgggcaaagagaaaaagccccaccctggcatgtttattcctcagtctctggttgtgatgtagtaattgagccagggatccaacccagctatacttagcaccatttccagaaggcatgagggcgggagatgggtatataaaaggcaggagtctggggctcctcactcagaggcttctgaaacctgagtggcattttcagtgtatccctgtggaggaaatctccgaaagaaggtagctgagtctgtgaccaaagagaggcttgagtcctgtttccttttcactctcaagagccttcaggctcactcaccccttcccttacagatactttgctggagctcctcctgacatgattgtattagtaaagagaggcgccaataacaaatggcccccaaatctcagtcggattctgcaacaaaggtgtatttcttgcttgtccttcatgttctgtataggttgtactgaaacccctgcttctggagccattttcccccaagattcttcattttaacatgtccttccatttgccatactgcaggaagaaaacatggagaactgcacagctcctaaagtttctgccaaaatgggacatatgccacttctgctgatgtttcattggccagtgtaggacccatggcttagcctaacttcagagggtgcagggtaatgtaatcctgctgcatgcctaggatgtgaagagcaggaaatatttgtcaacagcattaaacatgaccacagtgattataataaatgatttttcaatatccagttgaaatgatttttctgtttcttttctttttttgacacagagtctcactctgtcacccaggctggagtgcagtggtgcaatcttggctcactacaacctccgcctctcgggctcaagcgagtctcctgcctcaacctcccgagtagctgggatttcaggtgtgcagcaccacacccagctaatttttgtattttttagtagagaaggggtttcactatgttgcccatgcaggtctggaactcgacctcaaatgacccgcctgccttagccttggcattgggcctctcaaagtgctgggattacaggcatgagccaccatgcccggcctagtgtttcttcttcctctgtaatgctctgatggtctctgcatcagtacttatattatgcttggtaaatatttgtcttcccatctaaagtcaaaacattagggacaagatcctgttgaatgagggaactacaaatacttattgaggatccactcactgtataccaggcacagtgctaggtacacagagcaaactcccagtcctacaaggtggtggatctaatgacgtgacagatgacttgtctccgagttctggaacatcctgagcatgttctcatcccagcactgactagtccaactacttgttgattctctaagttagaattgggagatgtgggaagcttccagaaagaggtgacctgtgacctagcacaggctctacccacagcgggagcacaatgcattcttgaccttcacaatgcttttgacaatggttcattcaccctccatcacacttgttcctttcagtagggcagatattgttagtcccattttacagatgggaaaacagattctaagaggtccatcagcctggtctgcttagttctttgaggatgagtattcatctctctggctgtgtcagctgagctggacctgccgaattcaatcttcccatcactcagctcccaatgccatcagtcaagtgttatcaaattggtggagcttaaaaatgacagccatttgaaattgagtagaatttggtattattaaaatagcattctaaattttaatcttgtgcatcgactttttaatagcttctactttcactaaaaattgtgggccatgctcacagacattcaatttaaatactgtcaggcaagactgatttctcttccaacattgccagatttttcttttttttttctttctttgcattcatcttcttttttttttttaagcattgagttaatttttcactacttggaaatttcacagtgtatgaaacctcagaaaaagaacatatctttgtgtacagctcttttattctttgtcttctgttctgtagccttctttctagcctatctgttggttagggcaggatcctctgtggaagctaggtaatggttaattttctgggacaccttttctcatcacttcttccttgtcatgatgccaaacaagtctcgtagtcaatatcagcaccctcccctgcatgtgtcctttcaacacttaatctatctagcacttaaaaaaatatctgggagatgctggccatctatgaaggaggtttctcccttgctgctgtgtccattactatttttttcccaacttccccctgcatctgctgtatgcattactattttttcccaacctgtccctgcatcttacctagttttcttcatcctctcattcccatcccagtttctcaccttgaaccaagattggtggagtggaaatggagggcaaggttgatgaagaggagggacaaggggtgatatgaagtgaggagcatgggtcttggagtcagacctgaccgggcttgagtttcttcctttcccagttgctaactgtgtgaccctggaaaagttgcttaacctcctagagccttggttttctcacttgcaaaatgaggttagtggtacctgtcacacagggttatcatatggatccaacgagaaagggtacataaagtgatgctgagtgctgtggttaatggcatcatagccaactggccactctttcctctcctccactctgcaatttctgcaccccagcccagcagttctcaggtctagttacacattagaatcacctaggagcctttaaaaaaggtgcaaacatccctaggcctcactctagaccaattaaatcagaatctgggagtgtatacttgtggcatctttacttttaaaattttctctaggtgagtctgatggatgctagggttgagaacaactctaagtccccagggttgcctaaagtccaaaaacacttttcttttaagatcagaggaatcttattttagtgcttgtgggcagatctctcattagtgatggaatgggatttaaccttccttggctgtgcctaggagaaagagaagaagaggcagtgtggaacagggactctcagtgggtaagcccaaggtttccctttgttttcatcttgggacacctatttacccctgcaactataccgcttgtgcttccataaggatgaggacgggaggaggaggaagatggggaaggaaagagcaggaaaaggagggaaggggagaggcttttctcatgggaccttctccacactcctgtgcctgctgagatgtgtcccctcctctgtactctgaaaatcctttagtctaaccctgagggtccaatatgtggccagtagccacatatggctgttagacacttgaatatggctagcctgaattgagatgtgctgtgtcatacatgttccaaaactaagtaagaaaaataatctcattaataaaactttaaaaatattggatacatgttgaaattataatatattacatatattgggttatgcaaaatagtatcaaaattaactttacttgtttatttttcattttttaatatgagtaatagacaaatttaaattagctatatagctctcattattatatttctgtcagacagaactggttcaacccgttgtttgacactgagtgtatgtttcatgtgtaaatatgtctcaacgcttgcattagatgggcagtttgagaacagagacctcagcatcccattcattttctggcccccaaacacctattttcaaaatgccttgtactcagcaggcagttggtaaatgttttctgtaattgtgaatgataacagtgatggtagtgatgattgtggtaatgaagaagatgatgtaataaagctcaaatggtatgttggggccaaattacaaagatttttgtaagaaaacagtgcaaggtggaatggttacatttttaagaccaagcgccctcaaatacaccttaatttttgattaatttacatatataaagacccttgatacacagaacaaaaacatcttccatcatttctgtttagagatagagtgattcttaaagagtcttacaatgaactcccccacaaaatgctcagtgaactcttgctagggaccagttctaggtggtgggagtagagcggtgagcgaatgagataaaaatccatgccctttggactttacacagcatgtgaaaataaacacatttccaagtaaagtgcttacatgtccgatagtataataagcagcctggtggaaaatcaaacaaggcaaaggaaaggaggtgtggttggggcaggcagggggcatgtgaagaaggtgaacaaatctatgtgggcttacttgatcttattgtttcaataattcagctaatatgtttctttattcatttattcactcaacaattgcatatactgaaatcctattatgtcattcaagccatggtgagacaaggaagtgggtttcacctcccaaggagcgcacagcttactctcagaagcaggaaaacgtgccaattacccatcacactcacatcgtttctaaagtagatcctcaattaggcaacacttcagcagctgcggagtcactccgtagtagtctgaggcaacacaagtgcatctcatctgaaatatcctctaatgcaggatatactggagctgttgcctagggagatactgctcaaggaatatgggttccacaagcaaatgctatgaagttctagttattattttgagcccagaatgagttgaggcctaaaaatgttgccattccattaaaatgtgttagtttgaatttaggcacaaatgttatttttgaattataagcatgcgactcgtttatagtaatgtagctttgagaggactttgggttatttgccaggccattctttttccttttcttttcttttcttctcttttcttttcttctctttcttttcttttcttttcttttctttctttctttctttctctctttctttcttttttcttttttttttttttggtagacatgggtctctctatgttgcacaggctggtctcaaactcctgggttcaatcctcccaaagtactggacttacaggcatgtgccaggccattcttgatataagctgtttctcacccatttggtccaaaaatagaggagacaataggccctctgtccagggcaatccaaggtataggactcacatcctgctctatgccatctataccattgctatttgccttctcgaatgggctggcagaaccgagaccttccttgaccagatgaggccattctggagctccaagcaggaagcagaatgaaaacatgtgtttgttttactaaatagctgttgcatgtgttggatgtaagagtcccccttgcttaaagagaaaataacctaagaacttgctcttcgtgcatttcacctttagaactagaaaagctgtctaattagattaacacacaggtgcatgtatgtgtgtgttagagtatagatactgctaaataagcccagtgtttctctgcatttgtctgaattttggaaaatgggatgaggctgattaagtggctttcatctgagagctgtgtacttctgtggttctgtttttctcctttgaatccctatcctatctcatttggcctccttgctgtgatcccatggatgtgttcaagtgtactgctagttccctaccactgcaaaaccctcctagctctgcctggtgaccccataaatccccagtgttccatgcctggtgctctggggagggaagcagatggcagggctgtccattctgccacccagtgaggcaggaggtcaactagggtaacagcagcaggtggggaggtggggtttctggtctgtgcatgcaggggacaacagatcatcaatgatccatgggcagaacagccctcatggaactaacactgctggcagaaggtggcagcagctggaggctgcttcagctcttgatcaagcacagaataatgttgggtgggtggctgagagttgctgcatttatgaattgtcactcagtggcagcactgaggtccccaagctctgtttacaaatggattttttgctcaaatgtttccttaactcagagcaactctctctcctttttttccctctcatcccctggccaactcctgtgcacgctttaggtctcagctttgggccccaaattcaggaaacatgttcctcctctgtgttcccttacccctgcgtactcagcctatcgtactgtaaatgctatgtaatctgtctcccacaatgggctgtgccctcgtaacaacaggggttgtgtcttgttcctcattgcattttcatggcctcaaaatgtatatctagtgctgtcaatatttgtagacttgagtggatctcatctatgtgcatggtctaatttcattaattatagacaaaaaggaagtagcagcttgggtaaccaaacaagcagataatccccaatgtatttctttaaggctttgcagtgctccccagggcaatttgggacaggggacaggttacctattttatatatatatacatatattagagatgaggtctggctctgttgcccaggctggagtatagaggtgcaatcatagctccctgcagcctcgacctcccggactcaagggatcttcacatctcagcatcccaagcagctggaaccacaggcatgcaccaccatacccagctgattttttttttttttttaaaggttttgtagagacaggcccatgctggtcttgaactcctgggctcaagtgatcttcctgccttggccttccaaagttctgggattacaggtgtgagccactgtgcctggcccattgtcatatttattaagtaaatatgaggacttaagtggtatttgaatattgatatttataaaataccctccactgccttcctcttcagcatcatttcatccttactggctctacctactcaaaacaggaatggttgtttatggaagtggatatgtttaatggaaattcatatgtttcactgacccatggttgccatcatgccatatatcataaagcacttttgtataaattaaatataaggataagcaagttattgctcagattagatactgtattcctcatgctcagacctgctgccagtgtcagaggcctgagagtatgccagctggggtgggtcaggccagcgtgggatttaaaagttctctagataagccacatgtgatgattgagctctctctctgctgttcaggcatgtggctggcaggtacatggggggcagggagaaagacactggacttagactggagccagtgtgttttatggcctccttagtttagattccgtgtggctctgtacgttggagagggaatggggctcccctaaccatagtaataataacaataggaccctcctatttaatcccatctctgtgccaaacacttggctcagtgctctcccacattattgcatgccccagcatcctgaatggaaaatactattttcattttacatgtgaggaaactgagtcctcacaggttaagtgactttattgaggtcatataggtaataagtgttaagattcaagttctcccttgaacttgagttctccctggctgcttttcccactaaactttgctgcctgaagagccatcctgggctgttctgattttgccattcactgatagctgtgtgaattttagcaagtcatgtcaatctctaggcctcagctacctttctgtataatcgggagatcactaaccgcctgctttggagggatgttaagaagattgaaggaaccaaggtgcatagcagtatttacgaaattattgtgagttccagataaggaggggtcattgccattgtttgtatttcatcctgactcctggaggctttaggttgtgggctgggaacactgaactaatattgaacattcttccaaggagcaaggcaatggagatactaaccttggtgatctgcacagcttgtgtgagccccgtgggctcctctaaaattgacagaatgatgaggaagtgagtaggagtggccccaagcatggctgggtaagggagtggagagtggctctgttgtgatgtggactgagggtgtataagctctctgcagctttttgggaattgtggccattatgtttttactatctcccattgtaagaaatttctgaattctttttatggtgaactcagtgggtgggtgggtgagtgaacaaactttcttcagatcttacgtgatatgtccacagttttctcaggcagaggatagaaggggttagatattagaaacagtacaaagaaagggcacctgtgcaaaccaatatgtggttacgtctaatttggaacaacaacaataataataacaataaaactaattataatattaacatttatccttactggggttgtacaatgtggcaagcactttttaagctattcgggtgcattatctcatttaatttttataataaccttatgaactaagtattatttttgttatcatttttatagatgaataaactgagggacaaagaggtgaagcaatttgcccaaggtcttatcctgattagtgatggatttaggactggaatcagaggttaggattgaaatctcagagccttgctcctactaaatattttctgtcatgtctttgcaataaatgagggaatagaagaattaaattattttcaggataggacattcgtgttgttcaatttcttattatccagaccaacagaggggaggtgttttagttcatttgagctgctgtaacaaaaatacctagactgtgtggttgacacaaaaacactttttacagttctgaaaactgggcaatccaagatcaaggtgctaactgatgccatgcctggtgatggcctgctttctggttcatagatggcagtcctctgactgtgtcctcacctggcagaagaaacaagagggccctctggaatctcttttttaaagacagtagtctcattcatgagagatccttctcatgacctagttagcttccaaaggctttgcctcctaatatcacattggatgacaggatttcaatatatggattttgaggggacaaaacattcagaccatagcagtagccaaagaccacacaagtgatttgtgttatttctggtatgcattatgaagggttttttgatgattttagagtcagggtataagaggtggggaagcccaatgactaaaaatatagatatatattgaccgggcgcagtggctcacacctgtaattccagcactttgggaggccgaggcagggggatcacaaggtcaggagatcgagaccatcctggttaacatggtgaaaccctgtccatactaaaaatacaaaaaattagccgggcatggtggcaggcgcctgtagtcccagctactcgggaggctgaggcaggagaatggcatgaactgaggaggtgaagcttgcagtgagccgagatcatgccactgcactccagcctgggtgacagtgcaagactccatcttaaaaaaacaaaataaaacaaaaacaaaaacaaaaaatatagatatatatttattctcaataattttgtttatttgaacttgatgtcgaagagtctttctgttttctccttggaaatgtctcagaagtcatgacctcccatatatgttttcttctgttatcttttgttgataccatttgcatcagaagaggtcttcaactatttgcaaaagggaaaaagaaaagtcatgaccacccgtcagtctttgtccacttgtctctttcaggaccacggacaggggccaaggtgtctgagtagacaaacattttagttaagctacgcctgtgttcttggctcaggttatcttctttgaggccttttttctgacttttataggatgtcacactagcactgcctgagcacacacctgctgacatcagagtggatgatgctttaaacattttccaaggataatctgcggatgggtaactggtcctgtggcctcgttgggacttgacagtactggccctctgacttgcagtttgacctgcctgcctgagattttagtgtggttggtgccaagatttaaaggaagtgataagcacttacttgttcttcagcatcattaaatgataatgataacatgggtgatgacaattacatatttattgagtgcttactgtgcgccaagtactgttttgcatgtattgttttgtttaattcccaacaacaaatcttggggatatgaatagttttagatgaagaaaatgagacacagacagatatttaaaatgtgcaagacaacccagttatgtcataaacagtggagcagagtcccactttaccttgaggtcacgttgtgtgcactcccacaaggtcctcagggtggaaagggaggggctgacctcttcagagtgcctatttgtgtgctttgtgaatattattatactcaaagcctatttcctggggttgtgttgacataaaaatccccactttatagtagaggaaactgagagagcatttaagtggcttacctaagatcgcacagactatacatagagaagccaggtttgtctgtcttgaaactttttttttttgcagtgggctatttactatttatttcccagatggctctttacaccattgtgggcagtcctaccttacagtggggtctggtttctcaccttataggaggatgtggttgatacttgataagatttgatactggtcaggcgaggtggctcacacctgtaatcctagcactttgagaggctgaggcaggcagatcacctgaggtcaagagttcgagaccagcctggctaatatggtgaaaccccatctctactaaaaatataaaacattagcaggatgtgatggtgggcacctgtaatctcagctacctaggaggctgaggtaggagaatcgcttgaacccaggaggcagaggttgcagtgagctgagattgcaccactgcattccagcctgggtgtgacagagcgagactccatctcaaacaacaacaacaacaataacaacaaaaacagcagcaaagatatggtgctcagtctcctcttctgcttgggattcaagcttgtctagacaagaaggtggtgaagctcttgatgacagggatggcgggtgaacttgtcttaggtgtgcaagtgtggacccagaagcaaaaatgggtatgctgtgcagaagggttaataatcacccccagtctggatcattttgctgtaacatctgctgctaacccactgctaggagggggaatgccaattgtagtgctgctggagtagattttaaaacagaaaacatttgtgtgttgaagtgaggactggcgttctgttggttggatgacataagtcccaatttcttccatttccccatggtgtgcttgcattttggggcccaggtatactggggagggatgacccatatggatggagtgtaggctcactttggtgtggactagtctcactaataaccacgtaattatcattgctagaaaggactacagatcattctggaaaactctggaaaactcatttatttatagctaaggaagctgaggcccaaagtggaaaaacaggactgaaagtctgcatttgactttgaatccaatgctctttccctggtaacgtgattaataccaataacatgaaaatattatcaatagcattaatatggtcagtaaagcttccaccagaaataagcattgggccatatgttttgaagtttgtcaagaccactataagcagtggccctttccctcaaagaaggaattgacattctgggtcttgcaatataaaacagagatatcatcatcattatcactgtcaccaccaccaccaccaccaccacgctcgtcctcaccatcagacaaatctattttcagcacttactgtgtgccagattctgtgctatgtgctttatttatattgcatcataatttaaaatttatggcaaatctattgtgaaccatccttgtagatgaggttcagaggtgtaaagtaactattacaaagcctaccgttatgaagttccacgtgggggatgcagttagagaagacaaaacagtgtagaggcttcatggtggtgagacttgtgggggaacctgagctaagctccagagagtgattaggacagagaaaacagatgagatgaggaagacagtcctgtcaggagcaatctgaaggatttttgcagtgagggaagttgtgggttagactcagggacaatttgtagagaggtctgagtaaggaatgaatggcttccaatcactactgagcacatttcctgttccataccccatgtaaggcacagggtgtgcagaggtaagaggcatggttcctgtccttagaaatgggggggaagaaaccaaaacagtcaacccccatcctggataataagggttgggcaaagggtaaactcaaaggaccatgtgagttcagaggaatggggtcaaactcattcctcagtggcttgctaagggtttggctttacattaaaagccagagggagctacagaagtattctgagttaaggagtgacctggccagatcatctaactggggagactctgcagatactgtggagaatggtatggcgacaaggagacctgttggggcagcagaggcaagcacagcaaagccccccagcaacaacagtgtcaatgtcaatgcagagataaggcagaaagaagcgatcatgagaagttagaatggatagggacttggtggagggaggaatggggatgggcccagtgggcatccatgggaaatgcatttggagcctgttggtaactggccttgaaggtcatcctccctccttgcctacctgttcttggcttgtgagtaagtacacggagaacatgtgttagtgccatcccctggcttagtcagctacccaagctgtagcccaaagcccagagctccccaaagtcagagcttgaggctgtcccaggatatcactccatgcaaaggctgattccactttgcggttggactggttgtgtttgcatttactgtgccagccacacctgctctcctcgacgcccagtgctgagcctaggtggctggtgaagggcagacttccaggagcctggactcactgtggcagggaaggaggggagaggcacagctggtgccaagaggatattaacctgacatttagcaaaagggtgaatctgtttattgttctgtaacaatgaggcatttgcatcctgagtcgccttctgttttcctattgtctttgctcctcagtggtcaggccaggctgcagtcttgacagtttaaatcagcatggtaatgaaggggtggcacctagtcagttcaaaataaaaaatcaatctcactctctttctctgacacacacacacacacacacacacacacacacacacacacagagagagagagagagagagagagagagagagtctagagctatactgagtgtccagaagttcctctctccagctccttccttgatactcttaaaattgtagtatcccaacccagataacttggaggtttggaaaggggacccctgtattccttctgttgcctccaccatagcctggctttccagctaccaacagaacccacttgtaggcaagaagaagcatgaattgaagtcctgatgcatgcatctaggaatgctgagaacgtgacagaaaagctcttacacaagctgggcatggtggcacccagctactctggaggctaaggttggagaattatgggagtttgagtccagtctgggcagcatagtgataccctgtctctatacagaagaaaaaaatcagacattcaggttgaaaatttaaaaaaatattctctatagcttcataaatattttagcattgacagggcttgtgtgcttttatcatctcacagtggtatagtaagctgggtgggagaggtgtcatgctaggtgaagaagctaagacctaggctcttggatgtttataatgtaccaggcttggtactgggtactttaatggcatgacatcatgtaattctcactaggatacaatgggacaggtctggttttcccattttacaggacactggaaaagtttaagaatgttttcagctgggaattggcagagctgggaaggaagccatatctacctgaccctggagtggccactccactactgtgggttgcatggacaggtctggagagtgggcacagtgttcagttggtgccatgctgtctgctctccatctactccagtagcccacagtggcttgcaatgaagccagatgttctggagaaggaggaaacactcttttgcttctgtgcccatccttaccaccagaatccccacagaagatataacttcttaccctcttctttttcccaaattagatctggtaagtcagcatctgcataccgacctcaggatcatttagaagctcacagaatgttctgtctagaaattgcctccaggcaggatttacctatgacagccttggccagtggatggttctatatctttatgcccagttcaaactctggaacactgtcatccctgaatccctccccatctcccaggtccctccctctatggcaggaaaaagatccaacaggcctgacatggaacttgactgctagggtttatagtgatacaggaggcaggagagagaagtagaaaatgcatataaatacatctcatatacaatgtaacttatcttcagttactaaattagcactctttgctctccctaactatatgcacattgatatcactcctcttgcagctcaataggtatgtggtgaacctcttgccataaaattatgctcctgcaaagtgatgggcctgagcacagttgggatggggacagaggaaatctcacaggtccaaagctaagtcctgctccttcagactctcaactgggttcccaagctggcatggatagaaagggcacagtttaccattggtaaaggctttactctttagaatttgccccccacttcaaactcactcttccatgcctgtaaatattcttccatggacttccacttgtcactaaaggaaagattcaactcttgagtcttggtgtacaaatgaggggacctattgcttctttaatgtaccagtctgtcctcaacatggagaccagtttcatctcctttgccttccatcagatgtggatgggagccctgtattctgctgagctaatagaatgcctgtgtccctactggaaggtgacagggaagtatgcatccagcaatctatgggaatatcaaggccacattcccttttttaaaatgaggatggcagtgtgttagaatagaaagagttgacatgaggaacagctgtgaggttatgaattctgatcttggtttggtcccagtcaattacgtggtcttagttcccatttaaatgctgaataagtcaatcctcaggggtaaattctttcaaaatgctcataaattgtgaaatcctagtgttggtggggaccttggatattcctttagtgcaatgactgcaaaatatgactgtgcattggattgcccagggatgcttgctaatatgtcaatagccaggctctagcatagagtatttaggctccagcatgggtattttttttttaacagtcggtcctccttccagtgtttgggaacaatgatctggtttatctgccagctcccaggtagaggaaaatttgcaatgaaatcttcccagcatggctactcttagccagtccttactcccttcccctcattgacaactttcattctgtttctaaggagtagggctcttaccaaaatgtcaatgtgacccacctccagtccactcttttcttcgcagagcgtaagaactagttctgtctggcactcctggaatagtcataggacagagaaaagagaggaaacttttgagttctgataaacacatctgcagcacacatcttgtgagttgctcagtgttctgtatcctcttgtcttttctggtgaggatttgatgatgaagttggagcatggtcttcaagggctgaaatccaagagtttctaagtagagtaacaacatcatgaagtctcttaacatcactatgagataacccgtgtaaagagagatttaataaccatcaaatacttgtggactctcccatgcttccaaggccccttgttgttgagtggattgtgcacagaaataatatatgtccctcctagtccgagtcagtaaaatgcctctacctgcttctccatgctctcccttggcctttcatggtgattgcagaggccatgcattgagattgtagaccacaagatacaatcagcttgaatccctgagtcatctctttaaaggaagctgtgttggagagtcaccagacccaaagtgacttttcctgagtgagaagtaaatgtttaagtgttatgcctttggaattttaggttttagttgttactgcagcataaccttgtctatcctgattaatgcagttggtatcatcctgaagcgtactcccttgtggataaagcttctagttcttggcgtgtttgggttgcttttcctcctaaaaactgaatggaactagaactttctaggaaccctttcaagctgcagtaatgatttactgaagcagaaagaacatggttattttgagtctcagaagaaaaacacaaaacaaaacaaatctaggactgttgtctttccccaagaaaggaattaaaaatagactcatatggacaggggaaaaaaaaaccgacactgcctgatctggtgtggacatgttcttcgaaagtattaattgcacactcatgccatttaaaaatattaatttaaatgcacacagcttgtaaatctcttcttgttctgtctgctggatgacttgggacaaagcaagctgagaattaattgattaataacaagctgtgacctgtgtgtgtggttttactgacaatatcctcaggacttgggcttcttggagccatgcttctgtcagtgggaaaagtgctttcatctttagagaatgttaccactaagcagagttacctaatctgatgctttctcctctgggtatggcagaagtcgcttacttgagaatggatactgatatgttatttttggagctgtatttaggggatttatttggcacatgtggtatatattatagaatggcatgtagggtgaagccacggactccacaaagagccttctgtccattatgatctgttgcatactgaaaatttccactctgagtaatgcatatctttacactaaacatacatcattcccagaagttgtttgattaaatataaacatcttgcctagggaaggcaaaatattaagctgctagagtacatttggaattttcttagaaaggccctgaaagaataggatacaagtcagacatattttgatgggggatgtgaatgagggagatgaaccactgaggacagagtcttgaatgagcagaacattgtagtggaggagccgtcagctcaacagcacagattcctggaggtggacaatgacgtaggttccagggataaaagatttggatttgttcaggacaggccgtgagtgcctgccttggtgtgttataaagatcctatgtggttggtttctttaacattcaacacaggattctcgaatattttagaaatgtgcttgggtttttttctgtaactcctaggctagagttacatcatatcatatttagttcaatgtgtctgctgttctcaagtgtggtggtgctggcaggtaacaacgaggaagaagtgaggcagggctcaaattggggaatacatacctgtgtgcatcctggcccagggagtgggctgaaaggagggcaggagtggactggcctgctcaggctcccacacctgtgtggcaagaagggtttgacccagagaagcagagcaccgagagccacagaagctccctcttccttctttgagtgtgcctagggtctcagcctcagctttggcacccagagccacattccaattaggttcttaggggagtagccccttccttccttgcagagaaacctgcatgaaagtttgggggacttcactttcttcttgaagacatcttatgtccaaattaatgctactatttcctgtgtctccactgttttgacacttacctttttcatgcacttcccagagcatatttcttttgtgccagacactctttccccagaattctttccccagaattcttctccaccattttgtttagaaaaaatatgttgatgagtctcatggagtaaggggtaagacctcaaggaaaatgctccaccatcaaaagatgccataactttccatccacagagtgtagattgtgttacctggagaatcttttgtttggtgagtgcccaccttggtttagtgtgaaagtctgactgtaggtcagagcaaagcagaattgttctgcttcgaagagggcagtatcagtcaagtgaggccatgctctgctacagtaacagacagcccccacagtggcataacacaagaaaggtttatttcttgctcaatacagtatatatcagtcatgaaggtaggaggccagtaggagggtggaggctgttcatcagagtcactcagcaaaccagattgatggaaacttcctcttggtctttgcttccagcaccgtcttggcaggaggcagtggtgaactgctctggctaagagcttccatccagaagtgtcacgcatcatgtggctcatgttacattggctagagcaaaccactcagcactcagccacacttaactttaggaaactagaaagtgcaatcctacaattgcccagaaagaggacgtaataggagtatttgtgaatatccttaatgacatctacaaggggtgaagactgctctagtgaaaaggtgaggcttttggagggcgagtgaaggacttgggcttcttggagccacctttctacctcaaggaactctgtgggaaaaggtcagggaaggaaatccttggttgtgctttggcctggaaggaactaaggcaaactcaaaatctgttagagcatttgccatgagatatgtgatttaaattccttttctgccttacctgtgaaatcttcaacagtctgtgttgttcctttttgcttgtatctggagcaatggcatggggtggtgatggggtgggatgagggacaagagggagaagctcaaaaaagtgtaaccttcaggatgaaagttattcagggcaaaacaagatgctgtatacatgggcctaggcactggagaagccagagacagctgacacctgagttaatgtacctgttatttttcctcctagcttataaattcctcaaggtcaaggatggtttcttatttatatgtatgttctccgcagagcccaaaactactctggcctcagtaggtgctcaattgcttgaggcatgtttgtgggtgaatgaataaacaaatgcacttctgcctccttctcttgtgtgccaaggcttgcagcgggccagcagccaggggaggatgtggggtgggccagcactctctttgctcagaaaagcaacttgcctagttctgcatccaatcttgacttctaagccaaggaacgaagtctccaactgctctcagagtaggatacaaaaaccttcctcaactcttctcacctgtgcttagggacatttggcccttggtgaataggtccaccaagataccaagaggtggacagcagcataggagactaatttcaactgtcctttcacaaatcttctaggacgtgagtagggactgaccatcaattcatttatttatcaaacattgaaagggtgcctaccaggtgcttggttctatgtcaagagctggggctgcacccttctgtaagcttgcctatgagtgcaagctgctttcatactagaaggtaggatgataggtgaaccgccttctacaagtggagacccatggggccctctggttgtgcctccacagtagagtccatggtggtgtgagccgtaacaagcacagtccatggcggcatgagcttcagaatccaacacacatggattccatcactggctatgcatcttgagtctgatcttgagcctcacgtttaacctctctaagcctctattttcaactctgtaaattggcgatcacagtgcttaattgataacttgttgtgcaaatgaaaagtgaaaatgcaggtaaaatcctaagctcagtcacatagaaagcacttagtgtcagtcaatattgcaatatgatgatgccaatattgttaatgataacctttctaagttggagtgacctcacctaaaaatagtacctccatcactgagcctatggtaattacacgagatagtatgagacacttagcactttctgggtacaaaacaatagtgagtaacatttacccaagactttattttgtaaatgcctctcttccatcactactgcctcacttggggcacctgggagtatccaggttgaagatgcgggctcaacccaggagtcaagcaaacaatttctagtttttgggatgccttaaacaaaaccgtgaatctctaagctcctcaggctggaaatggctcactgctggtggaatcattaagagtgccagccagatctgattgctgcattcagaggtttattaatatcacctcgaatttatcttccctgatgaggaaattttgccagcatctgacaaaaatgaaatgtacagcggccttgtgccaacaagcatcctctccctgccatcggctgttagcagaaagccagtgcagtgggctgctatggggctaataaaaatataagatgaaaatgggcttcgcatcttcaattaggaatttgggcttccaaccctcctcctgaggctcccttccccacaaccaggctatgataataaatttcagaacctcatctccctctgcgagtgtggattctctccccaactaatcctccaatactcatctgagcataacactcccgatgaaaccacacttgtcccttctaaacacttcaatgaattcccttatcttccagtctggaatgtaaccacaaaagaatatcaatgagaggcatgagtggagctggctacaaatgaaacgtgaacaaaatcttggtggagtgcaatagggtttcagcaagaaggatcccaggttgcacttcccaggtggaagtgggttccttagactacattcggtgagtcaggtggtcacctgtggccaagtggaaagacccttcaaggccaaggaaccagacaatgtcttcaaggcagtcttgagttatcctgctggggcctggcagttggcagtctaagtggtagggggtgattgggaaggcactacaggtacgtgacgctgtgtgatagagtcaggagcaaggagctttggaagcttctagcgccaaggcaccttcagtccattatagaatgtccagtgtccccattttatgaatgagggcatgacccagaaagaagtcacttgtccagggtcacacagcaagtcagggtcgcagggctagagctagaatgcatatctggcttctctgaccagcagtctttcccccagaccatatccctactttcctttatgtggttaactttaattaagctctttctacctaccaagcacacccctaagcagtgggtgtcctcctttgaccttcataacaatctcgtgagaaagatcctcttggtgctttggtttgacacttgcatcttggggatgggaaagtttaaatgacttgcctaaaattattggctgaggtggtgggttcagggttccagcatagatagccagctctagagccttgcttgtaataagcaggctaaaccaatgcttctcaaagtggggtgcctggaggagcagcgttacctggatcttagaggtgcagattcctgaatcagaaactctgagggtgaagccaaccctctgtgcttgaacaatccctccaggagagtcccgtgcaggctcaagctcaagtttgagttggtctaaactacttaagctggtaaatcttctgtattttacaacgagtcttccttttcatgctttgtaaaccaaattgctgacttcccaaacctgaggacatttccaaggtcatcgttacctctcagcagcccattttcaggtggcctcttttaactgtgggattctttaggaagactgagattggcacaggttccctgctgcccagcagggctcctgagcttgaagacagcaaaattggtgttgttgaaccttctgttggccagaggggattttgagagtcctgtctgctatcacgtggacttggaaaatttggtccagtcaagtggaaaattaataaaccagaaaggaaagggacacagtattcaagacactaaatgctcattgcaaccagggagcctccaggtttctaagcattgctcttctgaatcccacactggagatattttcctcttaattcaatagatgtttatcttgcgcccaccaatgctgagtactttgcttagcactgggaatataaagatgaagggatgtggtccctgcccacagagaacccacagtctagaatgattatgtggtgatgggatcctccactggggaaaatgcagtggcttttacttgatgcagtttatgatgtttggttaatagaatgtcacataaaaacaaatcccctgattatcccactgccaatgggtggcactgcattctaataaaggcagcacttctttggtggtgtgggggaaaagaattgcagcccagtgcaggagagcctgatgaagactttattatttaatgaaccatgtcatatgaacagctgtggtgtaaaccagccaggacaattatgcaagttggattatgtctccagtaaattgatgctactttatttgattaggttggttctccaaagacaaattcttccaagttgggttgggggaaaaaaatcaccattctaactttgcttctgactttcaatcttcagattgcttttgctttctaatcctaagaggaaacaaacacaagatggcagctatgttgttatcatcaacagaaccgagaataatcacgtatctgtaatagttatcagcatgctctgtacgagactcacactgtcttttctcaatgagcttgcctggggggcaataagagacaggcaggaaactgtgaccattcctttgtgagtccccaaaacagcctggctgcagctcactaagccattgtcttcctttacacacaaccaaacgtaggcacatggctaaataaacataatgaaaagaaatgggcttggtgtgaaattcttcccagatgcccttccctgccttttcagattattaggtactatctagttcagtgtcactgtgggtcatggtccatcagtagcttgtgaaatctatttaatgggtcatcaccaacatcataagaaatgaagcagaatagaataaaacatcatagtacatcccattatatatagtaaaggtaaacattgcttcgtgtgtgtgtgtgtgtgtgtgtgtgtgtgtgtgtgtgtgtgtgttgggggtgtggtggtgtcttctgaaccatgttgtaaagtacatttcttcctgagggttgtggtcaaaaacatttgaaaaatactattagttcaagctgtttattcacagacgagagggcagggatgatgaaattaccctgctaggtggatgcaggcttttgaacagataatgtgagagcttttaggaagagagttggtgagcaccaggagctaacatgggttcacctcagccatcacccagacaagcttcagaccagactcaaatgtgatggtcttcatgccacacaccaggggtcatgaatgggctggaacttacataaacacaatcaagatggataacgagcaggtacaaagcaacatcttaggagcaattgttaggataactagaactattcctgctcttctccaagccattcagcaggggcgcaattgacattctaaaatctttgaatgtttgtcatgtggaaaatggaatcgatctcatctctatggccccagcacttagatgggtgttttgatctaggaaacattttctttttctttctataacatctctgatttgccctaattcctgcagccagacagtctgtaagtgaaacaggctgcttctggatgaaattcatttcctgtaacaagaggggatcaaaaaggaaaattatttgtccctgatgtggcctctgagggcagtgaaaatcactggatgaatggttagattcatcagtggcttttggccttaagacactgtacacccaatagacacacactcatgccctgcaagtacaagcctaattttcctgtactcacctttactacatgtgatgtactttgatagtttctattctggaatattctattatttcctgctagttccatctcattccatcccactccactccacttcatttcattccattctcatttcatttataaaatgacggtcaggactcatgaaactgatctcatggtccactaataggttgcaacctgtgattttaaaaataccagattgggttatattcaaattccctttaacccccaaatcctgtgagtccaatgtaaattgctactacagtattagggtacaaaattctgtgcacagcaggctcacagataaagtttttgacaaactgaaaaccatgtgttattaattcacttactcattgattcacttcctcatccatcccgttcattacttaccatgtgccaggtactgtgctaggccacattgatataaggtaaataagacacagcccctgttctcaaagagctcttggttacagggacactgattaggtttcctggggttgccaggatcctagcatctgctttccctgagtttccttggaaggaaggtcccatgcatgacacatcctgttcgctgttcttgggtgacgtatgtagccctaaagtcttggcccagtagcagagaatttcacatccttcagtaaataaaaaccaaagtcaaaatgaacatatgctagaaaacagagactggcagtgctgtgaaggccctgtcccctcatggactctgtcgtgagtggcttaaggggaagagaagtgctcctcttaccggcatcaggagccctaattactgttgtatattgattcctttcttccgcagaccgctaatcctgcagagcaacttgcagggcataataattgggattgcccaatgctgggagctaatcagatttcttatgtgtagaccagctttatgctagcgtttaaggaagctcctgattcaagcacagaaatgaactgtttaaccatttccgagccagagatgagccatcacagaccaacgcggagtctgataggttaggggtgaattgcgctggagaggctgaacgtttcttaaagtccactggcaacaggaagtcctcagaagtccaatttgttgttgttcctccctgaacttctggatttctgaggatggttgtgagagtggccgtgtgtcaatttttaaatcatgtggtaatttgtccatgattgtttattttgtcccccagcaagattgtatactccagaaaaggggtagctgacctactaggtgaaatcatgctgtagttctgagttgctgcttcttcatgcatacaatggaaacaagtacacccccaccaggctcatgtggagggctcagtgactaacctggccctcagctatcccctgctactcccataaaagctagcactgggcatgtggcttgtacttccaacaatgagtactcccttttctcccctaaatccagccctggaagcattgccgtgtttttatgcctcttggcattctttattttttgagacagaatctcgctctgttgcccaaactggagtgcagtgtcacgatttcagctcactacaatctccgtctcccaagttcaagcagtcctcctctctcagcctcccaagtagctgggattacaaatgtgcatcaccattcccagttattttttgtatctttagtagagatggggtttcaccatgttggccaggctggtctcgaactcctgacctcaggtgatccgcctgccttggcctcccaaagtgctgggattacgggcatgagccaccgcggccggccatctcctggaattctttgtccacttttctgtccttcctctcttcccttctctcatgctacactcctctttccacttttggtcaatcagccaaaattacaagtacttttccaaaccttggggtattggagtccatggctcctggctgctgtgcatggtttccccttttcctgggaagcttctgtcccactccctgcccctcacctcaccctagcactcttcataccaaacaaaatgacctttctgggtgttctccctggagttccttcgcttgcgcagtcatagcaggctagcgcctagtgggctgtgtgcatctgaattgcaggttgaatccaacaacatcagtgaggtgggaggcaagtggctgggtgcggtgccatgacattctggctcacctgtcatgttggatggcttgtgtgagccccaggaaacccgtgcacccttaggaaagcatgggatagatctcctgagatgatttcagagaaatgacagcagaccattgtgagggaggcagcatgactgggggaatggataaggcttaggtccctgagaggcagatccactccagccttgcggaatgtcatgctcctgcagagggctgcaagaagaggtgaacccattcccaatcactggccaggttagacaaatcattggattctgggacatcagagctgaaatagctttattggatcatctctggcccagctcgcttgctctctctctcaatctcttgatcttttttatttatttatttttttaaatgataaaaacaaagttcagagctggggcataacttgtccaaggtcactgagagctgtaaccatcaacatgtggggcagcagctgcctgggtttcaaagaaaggggacttgctgccattcctcctccccctagttgccactgtcttctcatgggtttccttgtccttccctggtgccgagaagcagggaggagggagcatctgttgccatggaaacaagcctatagtatgagttcgctctccccaactggctgtggtttctctgacaggggctgctactggtcctgctgttgggccctaatggggactcagggaccaccactgtatttgccaggggagaaagctggaggagcagcagacatcccctaacatgagttgtgcaggcttggtaatgtggagtgggcatgcattgtggtgattcttcttgcttttttaaaccaatttctcctctgctggagactcttcacagaatttaagagtctttctcagaaggtgatcagccttggacagactttggtcttcagaccccagagccaaacttttgaactgacagcagctgtggccaaaaatggtgtttgtcagacctgcaggaagaaaatctgcaatgaagagttggagtggtaggaaaagaggaaaaagagggaacttgttttgccttcagacatatttaagtctcctaagtacttcaggagttaaaatggggctttgaaaataaatagacttttctgttcatgtggggctgaagtgttccagggttggaaagggttttattaggtcatttcatctctccctctgtctctgggcctattctaacccctcttacttataaaaatcgcagaagagggtgatttcataagctgccacgacaacttgttccgctaacaattcatgatcttaaaacaatctccatagcagggagaaattcctcctatttcctccaaagctcgtctgtctgcgggccaaggctgctcagaggcagctggggttttaagaagtgagctctggacttggatttaatggtctttgttcaaatactgttattgcatccttgaacaagtcacataactgctccaagcctcagttccttaatctgaagaggttagtgtgaaggggagaaaaagtaacatatgttaatgtgcctaagatggtatctggcacacaggaatgcttgttagatgtgtggtgtggctttgggctgactaggatcaccatggtatgggcaccttttggatcgagatctcagaaattaaccctttggttgttggatcatggggttgggatgggggataggcactgcagcagcaggggcagctgagggggcactcctaagtcaaggccattggctgtttaccagccggtacaaaaggtttcaatatttgagagactggtttagttgtactagtgcacgctgtctaaattatcatccctagtggttccttcaaagacgctaagcacattcctgactccacttctttgtttatgccactcatgtccccccatgccttcaatgcctttacaaatcctcccaacccatgaaaatccaactcaaattctgcctcatacatgatgcaattcagcaccaaacccataaatctcatgccccacaagctttatccaggctggaagagagaagaggagaggttgtttctgtgtggctgattgagctgttggctgactcaagcaatcacagagcctcaggtatcattcaacctgcaaattatagatgaggaactgagaccagagaggctgtgggactcatcccaggccatcttagtcatcaacaacaggtctagagccttggtctcctgactctctgcctatacttcttgtccatgactgaggctgttccttgagcctggaatgagaacagagtcgtcccccaccctaccagcactcctcctacccagcacttgcttgctgagtcacacggagggaggtgggtagggggaaaatatatatttgcctggagaacacaccagtctggaaaagtgaagccagccaggttcagtgtgggtggagtctcccaccagggatcccaccctagcactaaccagggttgaggtgctggggaaaatgaaaagcattggtgtctttctgacccacctaggtgagtgaccaactttaagccatgtgtcacaacgtggcggttttactgtttattagaaccttgcttggcttagcttttgtagaacttggcttttaaatagaaattccttatactaacttgttctgctgtcagggagatgctggccagcctcgaagcacctggtatatagagacatctggagagcgtacttcaggctgggaggctttgaagtagatggttgtgggctcgtgtgtacatgtatgtctatgatcccctttgctggctgcaaattctgtcatcacatcatggaaaaattcttcttaaggaaagttgcaggtgcaaagatgctgatgttggatcaaccgaggaaatacagttttggtcacaaaagtggtatttatgcactctgccggcacgtggttggcccagatggcgaaaatactgttgagatggccgggctcctttgggtaagggaaatacagggctttaagagcagtagggaacagtgaaggatagagaagcttgatgctttggagctcacaggatcagagttcaaatcctgacttggcggccattttagctgtgtggccttaagcaattctccagcaccttgagcatgctttatgggtaggggctcagtgttaatttgggattctttctcatgaggatctcaaagataactgtagctgggtatctcaggggaatatggcccacagttttgagtcctccagcctcagacatcagagtagactcagggcaggtaatgtatgtgtgatggtggacacacattatctgcatggcggtggagaaacctgcacatgagtgatccctcatgctgccattttggtcatgtctcagtgttaggaaacttacagctgctttgcttcatttcctgacaaggcggcagctggaattgtcgactttgctgttatctggaacagctgctgggatttaatagtgcacttagaggaattacctggaatcacagcaggcattatgaaatgggaatgcatttctgtaagcccatctaatgtttgagggcaagagagcaggggctttccctccatagtgagtgagacataaaagggactggtttgtctgggatgttgccctcaagatgagcaatcatttcatctgggctatgctcagcatggcactcagcttgggcagtgtgtgaacttcagtgacaaggtctgcttaggggacctattttcagatcaattgctcaagaaagccaccatctctgggcacctggggagtgacagccatcttggctaggactcaagggcaactctagatagttcagtgctgagcctgtcctcccactcactcctctctgttggtctggcatcaccagactggcattttcctctcttctgggcccagtcaattcacttctttctctgatatttagtaggtgctcatctacagcaccttgtcgctgggtatgctgtgcttatcttaaggtggcttaaagtctttttggaaaacaggttaatgaacatgcaattattagacaacaatggcagcctaagttgtgattccaaattgaatctaagcaaggtagaatgagatgcttctcaacgtacaatggtgttacatcctgatagcccatcataagttgaaaatatcataagttaaaaatgtgtttaggccgggtgcagtggctcatgcctgtaatcccagccctttgggaggccgaggagggtggatcacgaggtcaggagatcgagaccatcctggctaacacggtgaaaccccgtctctactaaaaaaatacaaaaaaattagctgggcgtggtggtgcgcgcctgtagtcccagctacttgggaggctgaggcaggagaatggcctgaacctgggaggtggagcttgcagtgagccaagatcgcgccactgcactccagcctgggtgacggaacgagactccatctactgaacatcatggcttagcctagccttaaaccttaaatgtgctcagaacacttacattagctcatagttgggcaaaattatctaacccaacacctattttgtgataagcgttgaacattgcatgtaatttattgaatattgcacttaaagtaggaaacaaaatggtcgtatgggtacttgaagtacagcttcttctgaatacccattgcttttggagtattgtaaactcaaaaaatcataagttgagccattgtaagttggggactgtgtctgcatgtacagggatgatataaatgcccttggagcttggaagagggagaaatttctgaaggccagaagagactggctttggatgagctatgtaaaaccaaaacccttgtagccttgttgggattcagggagccatgccccttctgctgatcttgcaattgatgacctttgaactgaggcagtagtagagcttgggttaaattaaaggaaagggattctacctcatgtgttcttttgcaagttgagagtgtcaactggtctggggatgacttgagctgcgtgtgctatgttgcactggtgaggtggtcacttgacctcgtaccaatactggcttctgagtggcttccaggtattgaccttggctaatgagattggattcaaagcatttgcaagtgccagtaggtcagtgatcaccattatctactgtgcacctcctaaatgccctgccctttttgcgtaagctgggtctgacagccctaatcggtcctacctcctagatagcactgtggcccatttattcttacctagttcaggccaccatcacttcttgtgtagacaactgcaatagtgtcctacaaatctgctgacattccctcctaaacaccccctctctgtcaaatccattcttctaactgcggctggtagaatctttctaagatggttttctgatcatgttaattcttttcttaaaactcttcatttatttctattgcacttggaagaaaacctaatcttattatatcctatatgtgttgtctgacccagaatttttgtcattctttatttgatactcatgtggctcaactgcaacagcagcaaacagctgggctctacccatgtggatccctctacttggaatgtctctcctcttctccctttccccaccttttgcttagcctccacttactcatccttcttgggcatcacccctaccagatcaggttagctgctcctgttccacagctcatagcttgctgtactttccctttgcattccctaatgaacccccatgtgttatccatgtagttttctgtttagtgtctgtctcctctttccctttcagggacccttgcaaggtccctgagggcagagaccacccccattttgttggctactgctcaagacctagcacagaagcctgcagctcagcaggctctcagggcatgtttgtagaggcagtggctgctttggggtttccagagcttccttgggaggtttcttctgtgtgtcccattgaccagagcaccactgggggtgaagtgagccccagacatctttaggtttccatctttaggtgagctttatgcccaggcacgtagcagaagaaactgtttctactcataaaccaagcaaatttatagtggaaatcagtgggagaaaataaatatgaatccccatgatgtcattttatgggctgctttatagattgtaatcacccatttagagtttgcaggctattaattttgtttgcgcagagcctcaggactcttggggacagaatttacagggctgtggtgtcagacacgtggttctaggtcttaaacccctgaaaggttttggaaagagaatgacaggtagcctatggagcagctggggcttagggctctttcctctagctttcctcctggacatagttttaaaatatttgttcactgttttatcatcttaattttaccctagtcttcaggcctgtcctttccgtaagctaggtgactatgtgggtcttgcattaaacctttggtagagagagctcccctctgagaacctgaagagatgtaaagaggaacagcacaaggtcagagagaactgggtagaatccagctctactccttggcttgtgatctagagccaattttcattgttgttgttacttttttcaaccttcgtttctttctctataagttgagacccatgccctcaacctcaaagggtgattataaagataaagaagaggaaataggaaaagcatttggtactcaaaatgagttatagttcataaaatgactatgacgattgctgttttaaggtaagctgatagagtgggaacacagtggaaactaggagtcagggcacctggtcccaaccctgtcactgatgtgctgggtgattttggacatactagttagcctctctggtcccaaattcttcattggtgaaataaaatgtttggctcaaaagattttcagacatggtgcttctcagtgtggtccatcgaccaccatcccctggagacttgttagaaatgtagattctcaggttcagccccagctctcttggcccagcagtcaaaattttaacaagctctccaggtctctggtgggcatagtgaagtctgggaagcattaccttggttctagcactcatgtccgatattgacttcccaagcagcagtcacctctggagccttcctctttggggtcttggaccgcaatggcctttggcaaggagtctctgctggatctgtgctgcacacggggtgtgggaatctctgggcaaccagaagagcagtagtaacatctttaggtaactgaagtcaatcctgcccactgggcaaatattaattggttgctcagggctgcactgagttcaaatactgagccactcaggggcttcgaacgaccaagatcaggcagttttcaacctgtgatccacttttggtagatttaaggcaaaagcaaatattttttgccattttttcccaaattattttaccattatggcacgtgttgctcctgcctaggagatgcattccccagaaccaagcaaacaagaagaaggtcctccttcagtgggctgtcatcgatcattccccgttccatggccacaggactgactgctgatgaaatctaaaagaccagcttgcagaaggcatggaaatcctggggttaggggcccctctgctatggaggtatgactcacagtgggtcagggaacctgagtgggatcatccctggaactcagaatctctaagacacacttattggctctctataagcaataacagatggcaagataatattattcttctaatcttttgctaaaaacattcagtcatttctcaggggcctccctagtagaggaagacacctgcagggtatctcattctttcttgttctcattttcccttctaccattttccccttagtatatttctggccctatgtgcaggaaatcaggtagctgaggtgtggtttaagggacccattgtggttcttatggcccatcaacacaattccttcgtgttggcctgcagtatccatgtttgttacccttttgggtcaaggcatgaaaacatctgtccacaatgccagtcttacctctgatatcaaagatagtatctgagacgggtgataaacaaatttaatgtgaaaagctgatgatgttttgaagtcagtagaggacggagctgacaatgagcgtcttgcaatgagtctgttctcaatttcattgctgataaagagaaacagtgtagtgtggtggcgaagagcacagaccctgaagcaagaatccatgggctcaaattctgagtctttaagtctgtggcccaagaattcacatttctaactgacttcctgggtatgctgatgctgctggtctgcaggtcacactcagggtggcaaggtcaggcaaggtcagagcacagcatgggagggactgtgctgcctgtagtacacagtggaaggtggaggaagcccaggggtgacatggcttacttatatcatctatgagttttttgtttcctttaggaaatttactgaaacattcttcattgcaaagtataaaaacaaatataaaatattcaatgggtattagaaaatcaggtatactctgtttacctatgggtttttctagaatggggttaagggtgggaaagtgatgggagacttaagtagtagaagtctatcagaggccccttcagattaggaaatgccctcaatgggcttcagtatcctttatgagataatgcataagtgagtggaccctgaggagaggagagaagaacaagaccttcccctaaggactatacaagacatgtacccatggaaagatggatgccatgatacagtgaccctgtgagacagtactggtggagtcaatatgaataatgggagaaggaacattcacttctgtccactcttctaaatgccatcgtaaatgagctcatttagtgttcagagcagagtaggtattattatttccacctcaaacatggagaaactgaggccagagaggttagtaattttcccaaggctacacagctggcaagtggtagaatggggatttgaactcagtgatacagcaggaggtagacaaatccctaggcaaacacaggtgagtccccagtgaaacccccccctgcaaaccaaagccagtttaaagtctgaaagccaagctacaagtcttggataaatccacagactggattgagaacctctcttcccatttggcatgctttcctctgattaacccccacctcttcacctatacccacccttccccaattggtttttacactgttgcctttttttgcatactcacagaccaatcagtatccatcccctttctgagcccataaaaaccctggactcagccacactgggacacagagactacctgactttgggtggtagacaattctcacgtcccctctctgctgacagctgtttcatcagttaataaaacttttcaccttgctcacccactggctggcagcataacctcattctttttgaatgtgggacaagaaattgggaccctggagaatgtgggggctgaacaaacagtcatggtagctgtgagatctgcaccggagtagtcagggtgtctcctacagtgggcctggacccgagcaatgcttgtagggggaattggcagctgcaagtctgtggcccacagagtgaccaagaaaaactgcatcatcaggactggccacaggacaccattaattaagtgcttaaggagcagtatgggggtgggcagcaacccagggatgcaaaaaagagaggattctcaaccaatagctcctggagctcagagaagcagcccctttcccaggtctggatccatggattgggagcaagttactccaccatttggtggaaggaagcttggaaatcagagggaccagggctaagtcctaggtctgctgtttactatctttgtgaccttatgcgagcctgattctaatctctgtctccccacttactgtgagaaggaagttaaaggagatggcatgtgtaaagggcccatccaacatgtaggacatggcgcacccctaatatttggcagcttgtctccactttgcccattcctactcccaagccttggagtctgagatgagaggtcactccacctggctttagttgggtttgttttgagtccccataggctctctgggactctgctttctgatgggttgaaaacattaggctgttgtgagatgcttccattactgtgatctaaaagcatctaggatgcctagcgtagctttctcactggattgccaatttctcagagaattaaacatttagtgcccaatcagatatttttctatctgcatacatgtggaaatgtatgcttacccacctccggggcgtcaattgaagtgcagttgaagccaactcactaattctccagtgcatggtagaatcttcgtggttggtgaaatgagtcatgtgtatgatttgatggactgtatctatgaaagtagaagatggagaggaaacaaggtctgccataaagaaaagagcttggtatggatgcaagaggaaaaagaagggggaaatataatccttcaaaagtccatcaagtttacctagaaacagatttacttaaaagttttgagaaatttatttctgatgatgatccttatgagtcactatttcttatggaatcaagccagcataaaagttatcttgcattctcagcatagctagtttagagaattaggtcatttgtaagtcaaaagatttctacaaagttcaaaataaataaattccaggtatctgagcttaagatggctgggaagaaggactccatttgaggcaggttttctcatttcccagcttagaattgccttcaaggtctttttctttatctcagaacaacaaagacactgcctgaggaagaacctctgctttattatggtgttctgcaacctaagtcagtgaagttttgattctcctggaagaggctggccagctactcattagctgcagggattgaggggatttcaggcatcagatggaggtggggacagactggagccagagttcttgattccactgcatgttacaaccatctggggagcttttaaaaatgctgatgcccgggcctcacttccattaatggaatcagaacctgtggggccagcgagtgccctaggatttctgtgagcagctcgggctcagaaccacttgttggatgctccctaaggatctggcaaggattttatgagtttaggtttgagagcacctgaaggagtccagaggggctggagaagaaaggagatggtggcttggtaggcacctacatccccaggggtgctggtagagactatgctgcaaaattacccaggaagaagtgagtctttaacattgcagccattactatgcatgaaatggtaattaaaagaccatattttcttaactcaaatacgttgatgagaaagatgcaccattgatttaatacctgctgttttggaggatgcggtgggagaaaactctattaagtatgtattaacatatggactgattataagatctcagtttcacaaatcattttatgttggaaaatgtgcttcttgaaactgatctaacaacataatgatagagtgccttatatggattactctgcctagtcctcacaacaactctacctgtgagatagatgctaacatcctccccattgtatgggggagggagttgaggcacagattgaatagcttattcaaagtcacaggtagtccagagctggtcagtgatgggactggaattcaaagtgtggttttcagaagtagcccacaaaatgtagtgagatccaaggctgttgctttctcaggtctcttaccttccccagagccagggaggtggctttcccttaatcagggtaccgaatctcccaagtgcaggggcgtcctgtccactggctctcatgccctgcacagggtacctggcttaggaagtgaatgggaatgaaatctggcttgaagtcccttagcaggccctgaggccaagggattattttttctaatgccacagaggctcagcatgagctgatggagcccagcccagggagagaagccacactgactgggctgaacagtggacacagcctccctaccacgcctggtggttctttcacctttctgagcacagcatgttagagaatcactctattgggtttgtctgatgatacgggaccagggagaaggaattggagagccttgtagctctggggaccttgatgctatgcctttaggacaaaagcccctacttcccatgccagtttgccccaacagcatggcagaaatggaaaaggggagtgtaggctgaacaggacctttggaaaacaccaggttctgatttccagaccctcggtcttcttgtgcaggctttccccctctttgtttttcccttttctcaaattccttgacgtggtggcaagctgaacctcttagagctgcgttccagaacaacctgggtaatggaaagtacaaaaacaacttaaacttgtttccaaagcttgataggttacaccgacttctcagaaagtgtccatttggacccaaaatgtgaaataacattttgaggcacgttggaggggggccagagggttacgcagctgcaggcgtgggccagatgggaaatccagatgctggcctagggagcaaggtcccttctgctgctcatgcaggctgtcaaagcagcagcctccttaggaccctcactgcaagctttaaaatgttactccttagggagaatttcagatgggagggaaggcttaatcaatacatgcaacgtttaactggcattagaatgatgttttgttttgtttcttttaatgggagatgatgggtggtagtagtaagtcagggagggcgttgcagggtgtggtcttcaactttccccatctttatcacatgccaaaagttgctccatttcagcatgcaaatctaaatttaaatagtcttctggcttttaagaaagccccctagctcacctgtgcagtacgactgaactactatgaaaccagcactggtgaacatatatgtgtggaaacacaacaacaacaaaatcagttgttcaaaagacatatttattattccttcagcagagaggcccatctgatgctctggggcgcaggtcccatgaatgttcagggcagtctctgcccaggccagctccttccccgattgtccacagtgatgatctcttacagactgtcctgcctgccctgcacacaatgggagccagtctggaggaaggtttggtggccatcactctggcgggcactggaaagaactctgctggatgccgagggccatttctctctggacttgctggtgttcagtgtggaagtgggagggaaatcaaatgaggggacctttgggaggtcacctaatgtggtaggacctaaactcagctgggtattggaatcatctggagatttttttttcagttagggtgccccctcctgccttatcaccatagatctgcagtgcagcccagacatccatttaaaataagctgcaagtttgggcacggtggctcacacctgtaatcccagcactttgggaggccaagttgggtggatcacctgaggtcaggagttcgagacgagcctggccaacatgacgaaaccctgtctctgctaaaagtacaaagattagctgagcgtggtggtgaatgcctgtagcccagctactcgggacgctgaggcaggagaatcgcttgagcccaggaggtggaggttgcagtgagccgagatcacaccactgcactccagcctgggcgttgagagtgaacctctgtctcaaaataaataaataaataaaataagctccccaggtatttctgaaggttcaggtagcctttctcattagcccgttccccaggattcttctctcagtcctttttgttgacaagctctctctggtttagcaggggacacaaggttcaattattgttccattcttacgatacaattcttggatctggtttggatataaatgtctaggttgccagtttcttgacaacttcaagggccttgaagttgactggtgaggaaaaggcaaagtaaatgcctgagggatggataccaattgctgtccccaggtttagtcagcaacttttgctgttgctcctgggtctactgtgtgcactcctttgagggccagttatcacacaggtctccctttgggtctccatcttggaatccaggcaggagaaattaaccaggaaattaaagacatcttcccttctccactcctgtcatgtttagatcttgggagtaaggagaggaatgggagagcaaacatagcttggctggagaaggaggtggttttgatcttttcttctccccttcctttcataggtagaggtcgtctcctttataccatctgtcttggggagtagtcacattaattatgcgtgtatttagagctttacaagccttgccaccagacgtgtgtagtgccttacagtttaccaaataggttcacatactaatctcttttgacttagtgagatgatgactcagctggttataaatcatcaaagcagcaccatggaccatgcatgacaaccatggagctagggcaaagctgttacttgaatgaaggaaaatgataaaagcttatgttccctgagccgcaaaagaaaatagccgtaaaatttccattgaggctttttctgttatatctttagctctttaaaaatctcatattgaagatacctaagaagtttggcaacaatgtcctgtagatgaaatgtgggtggagccaattgattgggcttcaagttgcataatgttgggtatggtgaggctatttggtttggctctactcttgggacaagagacagtgggaatgtgtccttgttttgtagttctctggaagccagaggaaggttatgattataaatttaatctctcagttttctctgtgtctcagccttcttcacagggggtaggacctccgtcctcacaagttacgggggtggtctcagcttctggagcaatgaggcaagtctgcaccctgttggatgtcttgggtacaaccagattaatgattcaaaggctgggggaagtccaggctcacaaacggctttcccaaagctccagaaggaactttgttcttctctacattcccccaccgcccccccgcccacacacccaggcattcctcttagattttataatctctttggagcagatcggcaggtaggacctctcatctgtttttttcataccgccatgtcatcagcttgataaatgagacagacacatgctagagtggagatagcattctgtgaagagcatagtgatgaggccagatggctgccaagctcaccccagtgtgggtctgggatggcagttctatccaggagactgctaccatcagaccaactaagggagatgtttttcatacatcagctttcattggaactgatagtgttatggaaaatctgtcctgtccccagcagaatgatcaatcaagggtgatgagcctccacttgggtaagcatggctgatggtcccccttctgacacatgaattagttggttttaaaaggtttacctccatattagttccctgttgctgctgtaacaaattaccacaaacttagtggctgcaacaatataaatttattgtcttacagatttggggggtcagaatcccaaatcatctcactgggctaaagtcaaagtgtcagcaggactggaggctggctctgggaagactctgcttcctttccttttctagcctctagagactgcctacactttttggtccatggccccttcctcacatcacttcttacttttgcttctgttggcacatcttcttctctgattctgaccctctacctcccttttataaagacctagtgattacagtgggcccacctggataatcaaggacaatctccccatttcaagatccttaacttaatcacaccagcaaaccccttttgccatgtaaggtcacatattcatgggttcttgggattaagatactggcatctttgagggtcattattttatctaccacaacttccagtcagtgatttctcggtttatttaccagagcctcagggagcactgcattttgcccttttacaaaattacttttaaagagattaagtatgtacttgtaaaaataaaaaaaagttaatttgtttgaaatcatatactttaaaatatctcttcatccccagtttctaatgccccatttttccttcccagagctgaaaactgttttttttttttttttttttttttttttttgagacggagtctcgctctgtcgcccaggccggactgtggactgcagtggcgcaatctcggctcactgcaagctccgcctcccgggttcacgccattctcctgcctcagcctcccgagtagctgggactacaggcgcccgccaccgcgcccggctaattttttgtatttttagtagagacggggtttcaccttgttagccagaatggtctcgatctcctgacctcatgatccacccgcctcggcctcccaaagtgctgggattacaggcgtgagccaccgcgcccggcctgaaaactgtttattaacaatctctagtgtacactttcagtgagaatctatgcacatacaagcgtatgtgcacacatatatgcgtgtctatgtataattttcccatttaaaaaatgatggtgcactttcacactactctcttttttttttttgagaccgagtttcactcttgttgtccaggctagagtgcagtggcatgatctcggctcactgcaacctctgcctccgggattcaagtgattctcctgcttcagcctctggagtagctgggattataggcatgcaccaccttgctggctaatttttgtatttttagtagagacagggtttcaccatgttggccaggctggtcttgaactcctgtcctcaggtgatctgcccaccttggcttcccaaagtgctgggattacagtcctgagccaccacacccggcctcacactatttcttaatgatctattcacatcagacctatatacctgcctttaaaaacagctacaacatatttttactttgcattggtgtatccaaatatatgtaattgggagccccttatcaatagattgtttcttttcttttttttgagacagagtcttgctctgttgtccaggctggagtgcagtggcacaatctcggctgactgcaacctccacctcctgggttcaagagattctcctgcttcagcctcccaagtagaggggattacaggcgtgtggcaccaggcctggctagtttttgtatttttagtagagacaaggtttcaccatgttggcaagcctggcctcgaactcctgacctcagatgacccgcccacctcagccttccaaagtgctgggattacaggcgtgagtcactgtgcctggccctgattgtaacattgtttctaatcttgtgctgtaataaacaatgtaacagcaaatgcattcttacattggtctttgcacacatgtgccagtgtatctatggggtaaactcctatgaatggcatttttgggtcccaggttatgtgcaccttaaataatgatagttgttgctgcattgccttccaagatgtatatatgaacatatgcttagagaccatggcacctgggcctggtcaaacaccatgctcagcagggctctgccatgttattcactaatagctctggggacatctcattatagttctgcctctgacaaggtccaccctccaggaaatagctcactagttgggggttaagtcaaggatgataagtacacccattgggtgagccactgcaaacctgggcccagagttgaagccaggacaaacatgttcactagaaaggctattcattaaacatcatattccaagctattctgtcaaattctagggacacagcactatgtcttcttgaaaacctctgatttcttttgtctgtccacgttgctggagctagacagtgtcgagactttgatttgagtaccgcagtggcgggctattctgggaggaacagacctgaaagaggcagcacatttagcagagactgcagccacaccggctggggccagggtgcttggatgtgacacagctattgtttgtgaaagagatttgatgcttcattagagaaaaactgtgtacagaaacccggcagagatttcttaatggcattctgattaaaggagcaaacaacctaaatgccagattagtcgcattttgggaaagaatgcatgatggggactgcatttctatttccttctttccctcagccttgcttggcagcatacatttgtcactttgaggacatgagaaaggggctctctgatgtagcagagaaagagctggaaagcagaggcatggaaactttcagctttctggcaggccaaggggaaggttggaggttctgatacagtgtctgcaactcccagggtccagagataaaagtctagacggtccagtggatcaccttggaatgcaaggctatgtggatgtgcatcagtcctttcaccaggaaccttccagaatggttaagaaaggaacccacaatgccccttagagtcagggctgtcatgcacatgaatggttacctcttctgtaccatggcctcagaacatggtagagctgatatcaagggaaccaccgtttctccctcagaaccatgctttaggagctatggttgtcccccccattcttgttgtgcaaactcattaggaggggtagctctctcttagaccttcaagatggggatatgcctggacagggtgaggcattaagggtctctctttataaacaatgaggaaaattccctatacattggccaaagtgatctttttaaatgtaaatgaaatcaattgtaagttccaaactccttcccatggcattggcccctgacacatcccccattgctcagatgcattggccacattggcttctggaggctcttgaagcacaccaagctagttcttcctgggagacctttgacctactgttccctctgcctgccatgctcttctcctggcctttcaaaggtagatccattgcgttcttcagatctcagcagagatatccccttaccagctgatatagctctccatccccaaatcctgccacctcgatgctaatttccttcataatcctaacatgatcaggaactgttcttattcatgtatttgaatgcttacttgcttattgtattcctgcccactggaatgtaagttctaagagggcagggatctggttagtcagattcaatgcttgtagaggtcagaacccagccaggaaaacaaagtggctcaagagagtatatttaatgtagggaactattaccctagcatcagaagagtggaatggctaagtaggtcactgtagggcaacccggaggttgacaagagaaaggagctggggcctggaaggacaaaaagaggaggtggtatcatggaggagacctaatcatggctgaagaacagacaggagagggacaggttccaacttctcccttccttccgccctctgggctttgcccagtgcttccactggccaaatccagtatgatccagttggcaacagtgccagaaaacatagtgggggccgcccctgtgattaagaatagagcaggcaataggtggggaattcatctgaaaacactgaaatgactggtgccttgctctatctccagctgtcttgacacatactaggtcctcagcaagcaattgttggatggatgaattaatggaacgcaccactccaaaggagtcagctttcaggtcaactctaatggagtggatccctaagagggaagggctttgcaggctgggtttaacagtggagacttcctgaggcccggcggggtctcagccggctgtgccttctatctctgctgccctgcccagaggaggatgaaggattcttatctctggaaataaccctctttcatgagccctttaatctgagcctgctgacacttttatatgtgcagggttatgttacttgaggaattcctttgaagacaattttaaactttcatcccttagttcaattttaaagtttgtaacatttgggacccttctcagagccctgaatttactcctggcatcaagatgttcagggcagagctgagctggaggggaattccgcattcctagtgatccttaactggtgcccctggggaatttatctaacatactggagcctccactggtctgtaaggcagaattaagaacaccttgaaagaacatgaaaaaatgaaataaacagcccaagtaaagcaccagcacatatgaggcacttgaaaatgttcactccttttcccccagacgctgggaaatagttcagatgccccctatcccaggacccatgaagcagctcaccgcagcctctctatgttgatttttagatttccttctgttgattattctccacggaaggcgactggagcaaaagaggtggttggccacccattaatacatctccttcttattgggacatttcgccctgctaaaggagtaatcatggattttctgtgaattttcctttaagcgttttctgtgttaaaaaaaattgtagtctgcctaaactgatttatgtgggtaatttatggagtacctgtttttcttttttctctcttcctttttcttcttgctgaggtggtacctttgctgcctcatccctggagttttgcatgagagttgaattttgagctgcaacagtttttcccatttaagtgttagagttgactggtactttatcaaagttccgtaagtacatttcatacaagaaatctcagcaggttagaatccggggactttttatttaaacctctaatgacagtgatactggcctgtaattaaggcatttctggaagttacttcaattgacttgcagaaaggaaggcagaaacccttggaggctggtactaaattcatggggaagagaggcacgggaagctgtggtttgggaggagggctcatgtgtagcgtggggcatatgtgtgtgctaactttcctgggtttctgtctgaattgctaatatgacattaggtgaaaggcatcttgtcaagaatgctgcatgtctggtggacttcctgaatatcaaatctccgagccttctttccaactgcccctcctggccagcctcatgagacactgatgagaaaaatgccacagctttcaaaacagttaacctctcctttggcaattcacagcactgggtttattcaagcttacgatgacacagaattttcctccctttgaaaagtactggttaagtctttctgtctcctgcccttcaaaagcagtcattgtgtttgtttttttcagaggtaccatcagggttgtcagaaagtggaatttcccgccagatcagaatttcttcagccttcattcatgacctgagtacttttggttttgagggacaaacttgctctattttgagcactgaaggaaaacatctaactcccaattatgggtctgtgcacgtgaataattgggtaatgggattaaagtgcttgaagatacaacccttcctcaggtgccccttttcacacataaggaaagtggagtacgaagggcactggctcacgggaaggagtggtggggaccccaggccttcagtccctcatttaacaaggttgtaaagtctgatctgacttcttactgcaagcaccgctacttctatgacatcctccatgccctttttatttcaaaagcagtttaatatgttatttcatttaatctccactgcaactatttccatttaaaattttgttagataatcaatagtgctctaaatatgaaccaatttggaagaaatatgaagaaaagtcatcttttagagacaacccaattcatgggccttgtaaacatttttattttttaggtaatcataaaataaaattgactttttaaaaaaatttggtgtgtaggtctatgaattttcacaaatgtatggaggcgtgtaaccaccactataatcagtggaactgtgcctttaccgcatcgaaccgcctccttccatctctaacccctggcagccagggatctgtttttcatcaccatagctttatcttttcaagaatgtcaaataaggagaatccacaggatgtggccttttgaaactggtttctcttatgggcttactttttttttctcagttagaacttttatttaaaatcaacaatcaattgaacttgcctatttgccgaacaatatctacaggtagaaatttgcaagaataactctggataagcatagtaggccatctatttcatcatgaaggaaatttttgatgtactattttgaagactctatttacagtcccttatatttaaactatatctattaaattagtgttatattgaaatagccattaaaacaaaacaaaacaaaagtcttacatggaccaggcacttgtgaagtactctattatttcatttaagcaaatatacatcctttatgggtcatctgtgtcattttgttatttactcctcttgtacaagcttggcagggtttgagtggttctttaaaagagaagttggtgatagggagggaacttcatttctgtcccagatgctgacaccttgtgggcccttggtaacttccgctgctgtccatttccctcatgtaagggcagatggcatttgcatacctggagggacgccggctggagttacagatgcctgctgatgattggaatgttagggacttagtgacatgtgctgtagtcatggggtcctctcagacacttagggcatgcaggccttaggggagccctgtgcctttggggctggctgatgctggggagtgggactgtctgctgggttcaaggtggaaagggaactgctcctgtgtggtttgcctgccaaggagctaattaggagaatgggtttggtgatcttgatctgacagccaatgggagacttcctggggagctggaggagataagcctgtcaagaggctcccagctgtgttagggccaggattgtcattgctgctaggcagggctttggtcctcccaaaatgagagtgagcagattgcagcattctttctcatagcaccaaggaatcatagactccatggctaagtgaggtggaaccaaccacattgtgtggtcagccagtgccaacctttcttcttgcctggccttgtggatggtgttcacttttgagatgcaaactccaggttatgttatgaaactccacttctttgtctctcaaaaaaagcttgttaaaatgcgagtatcagtagccttttatttcaagcctcagatctcctctaatcaggccatcaattggccatactgatagctattattaaccattattgagaggcactagattatgaagagttgagtagttaaaagcagcatttctggagacagaccacatgattcctagtctcacctctgcacctggctggctgggtgacccttgcatgttgtcagcctttctgagccttggttaccccactggtaaaatagggatgataatagtacctccttcacaggtttattgtgaagattaaattagtcaatacatgtaaagctactgacagataccagcctttggttgtaagttaattttgaggattctatattcggccacctctgctactctgtcatcacattcagattgagaactgctgatcagtctaagtctcacagggaataaagctgaggtctacaaaggctcagtgatgtacacaggcagaaccagaactaggagtgtccctggacccttaatctcttcacactgcaaagcagaaagctggtgatctgaataaactgtttgctcttggggactttgctaactagaaatctttattaacttggactctgattttattgtcaaggcaagaataagcaatttttagatcaacaactccaagtcactggagtcacttcagcagagtttcagtgtttagtgtgatttgctgtgcccatttctctgcataatggccttccatgcatgtatgaggggaagtccatagttaactggaatgcatgcgtaggcagagctttttgtttgccaaccaggagtgataacggagtttattgccacttgatcccctctgccagcccatctgggtcaacttgtttttctctggtgtttgccctttccatcaaattgttccagagactaacaacctggcttagtgatgacaagtgtgttaatagtggagctcaagataaggcagcagtaactctgtttgctctgagagtttgctgcctgcctgctgagtgatccagggacttgtcagccctttgagttaatgtgtgtgaggtgctggatgcagagaagagcacttggtgtgctttcagcttgcacatgtgtcttggtgctcagcactccccatcccatgccaggaaacctctctctctctctttgcaggagatcctcatgccaactcccatctaaaaaatgaatgcttgtgatttggaaatactttttcatagatgctcagaaggtgtttagagttttggcttttgcttagttcacaaaccaggtaattcccagttgtccatatgaatgctctatagtcaaatttaggatcccaaattggcttctttcatcactgagcaagcttctggactagacagtctcttctgtaataaaattgctaaagtgaatgcaacaggaaggagaggaggaatttgcaatgacctctttgtgtaggtagatagtctgtgctttcctgatgcaggctcccttaacatgaggattgtgtatggggcagtgacgtactgcttctgaattatccatgcaaaatgtttggctctttgagtgtgaagcagcagcagttgcttgtattttcagacaagggtctcagtgcacggagaggactccctccaagtgttgtctttgcatttccattcatcttattagagcagtgcaaaccctgatgcatgaatgaactgggtttgtggctgaatgagtttggatttgctgagcaggctgattcaggaagttgtccttgattcccctgctgtttcccatgtatacacacccttcctaagtgaatgtggcatttgtattggatgaaggccatagctcagtatgaaacgtgattatatgtctactctaatcctcaacaggcaatgctttccacttagggtgttttagaggacatgtgtaccattggacttgcatgatatttgggtcaaaggcatttatggacagagatggaaggtatgatctatcagcttagaaactcaacctcaagagagaggagggtgtataaatgaggatgcataaagtaagaatggaaccccccccccccccccgcacacacacacacaccgtccctagtcaaatttgcaaagacttacggatatgctaataagattgctgctggctaggggaattcacaggtctgcaaattctatgaattctaatgcctcactcagcaattttaaaaatgaatggactggaattaattgggagcctccttccatgggaattttggaagtattcttaggtatcacagaacactgtctgtttatgcataaaactccataaactacaatggaaatcactctagataacaacgtgagagatgggtattaccaggggcatatggcgtaattttaggtggtggcctgacccagcataggatgacacagactccaatgaggagagggttatgttttcttttacattctctttaacacagagagaatgtcttccctaggttctaccaggtctttaacacctctctaaactttggcaatcagcctccgctctcaggctctgagtctttgttggggtgacaagatcgaggtggcgtttaaatgatctgggttttcttttttgctgtatgtttagaattaccttctagttatagcaagtgagatgggctttccatttgtggtagtgaaataaagttcaatttaaaaattgaactttaaagaatgagatttaaagaaaaaaaattacacaattaattgtgtaggtagagtcccattataaatatgttgtcaggacaggacatgagtgatagagataaggaaaccctggcaataggagataatgactactttgattacacagggaggcagtaaggactggttcctccttcatcttgtaaacatggccactgtttccaccaggggaatactgatcgctgtcctttacagaggcactgtgctaagtaagtacttttcacacatctcatctaatcatctgaacaacccatgaggtatgcataataacaaacctcttcctttaaagatgaggaagctggaacttagagatagtaactggcttttccaaaaatacatggccagtaaggggcagaggcagcatttgagcacaggcaatttgactccagagcctggcacctcacccctatgccatgtggtaacacccagtaacagccccagagaaatctaatcagagaaaattccagtcatttcagtttactacctggggcaaattgagtttatggtgggggaaaagaaaaacacattttaaagaagggcaaaacaccatcctaaacttaatgagtcccatatgccatccctatgtaacatcttaattttcacctgtttcagtgtctgttctatttctctcataccactgcctgtagaaaatagatgcatgttcttgaaattcctactttttctcattaaaggttagattttattattctttctctcaaagtttggattgccaaagcttttggatttggaatatatttggcttgcatagatgccaatatttatacattgatacgaagattaaaaaaaaaactttagaggagagatccttttacaactagacttgatttagagtctatcagaaattttcttacatatttagcataagtattgtgagataatgtatgctttctaaaaatatacatgatgttctgctcagtcgaatgcatttatttctttctttaaagttttctgggtaaatttcaagagcatcgggatattacttaacttggtagattttattaaacctccaaagaacataattaactcattttacaaactgttaatgcttacagaaattcatgataaatgagatcacttaagactgtttcgggagaacaggaaaagccagtttgttaatgctggtcctcttctctattataatattgtgagaaatgaaggaatgtttatcactagctgttataaccttaatttgagagttctttaaatggcaattacatatatttacagaagaatgacactggcatttagctcaatattttcagcttaacagagtctcgttgggcgcggtggttcacacctgtaatcctagcactttgggaggccaaggtgggaggatcacctgaggtcaggagttcacgaccagcctggccaatgtggtgaaaccccatctctactaaaaatacaaaaattagctgggtgtgatgccatgtgcctgtaatcccggctacttgggaggttgaggcaagagaatcgcttgaacctgggaggtggaggttgcagtgagtcgagatcgtgccactgcactccagcctgggcaacatagagagacaccatcttgagcaataataataataataataacaacaacagagtctcccctgaaagagggattataaaaccagggcaagcctgtcaaagagaaatttgatttggttctgctgttttacattttaatatgcctgtatgatgacctagcccattaaattttttttctttaaattatcaataggctgtctcaacctctgttcaattgaattttactctactctcccagggaacaaaatgacagagcattttgttctaggtaccttagttcttgttgcctattgtggcagctctatttccagtacagagtttcataggaaacctctcttcttctggtcatgcctatcacccagtcacctttcctgaacaattaggaattgactttctcttccccaatgctgcatttcactctcaccctcagtgtccagccctggtcatattgtctttagcccaatttttcaccacgccatagtctttcttgccactgggctttgcatgtgctgttccctctgtttgcacatgctgttctctctttctcctcttcttcccatccctttcccacagcacacgcctttcacccaaatagcacctactcattcttcagatgccagctccagtgcgactttcttgagaaacttcttttcaccttgatcttttgtgagcagctcttctagaattgtgttatgttcttccatgcccttatttcattttgggttcacattcattggggatgattatgaatggatacctgtctcccccattaactgacattgttaagttccctgaaagcagctactatctgttttttgtctcagttctatcccagcacaggatgagcactccattaagtatctgcagtatacataagtggacagaagtgtttgtaaacacccacgttctgccattcttccctcaatgccaaaggatccaactctaccacctcatcaaattcagagacagcttctgattttgagccataggggtgtcaacagcacaagtgcctgaagggcccacagaattcctggcatgtgctgtactttatcaagaatctgacagggaatgcggctgtccctatcaagctgttgtgcctgacaggcaccatcttggttagctgtgggaccactggtgtttctcctgaagctgcaggacagccagctgcaatgggctgactgatcttgaaatgaaaccctgcctccttctccctcctcctcgagccagagtgaggtggttttaacttctatctagacagttctgagattggtagaggagaaaatagaaagttcttacttaaattattggtgcagaaagaagaaggtgtatgtgaagaaagaaaatggacatttactgactattctgcaacacagcctgtgcagtgtgttaggatacacacccaacatctcctttaactcatctgttgccgcagactagtcaatgggagcaccaaaaactaggtaaaggctggtagttgaactaagtctgtttggctccaaagcttatgttggcaccacaacttcttcctaagacgaaggttggccttcactggtctgactcaaaagtagagaacatttactctgccagaggcaggaacatattcagctagcttcaggggtcctggtgctacaatcacttgtgtttctttcttttgtttttttatgtcaaaagtaattagcaaagaaattctgttttgattgtttgttttagagatggggtcttgctatgttgccccggctgaatttgaactcctgggctcaaggggatccttgtgagtagctgggactacagagcacaccacccgcccagccacctgtgtttcttatcagagcttctatctctttgttgttgcagattggagcctgggaggctgggggctggggagatagtcaggacccctagaagggcaggaaggatgcacaattattccacagaagaagcctgcctctgtttcccttgatgtcacctagtcaacaaagtcccacagtttatgagtttaacctacagaaattctaatatacctgccctgcacacattctgctatgagagccaagggattaaagatcaacaaaggcttccgagaagaatgcttggcttgagattaggaggaagaataagagtcatccttcatccatgatgaaagaagactggtgggaggagaatgggagagaatgttgcagataggagaaacagaatttgcaaagtccacgtggtggcacagaggaaggttcacctgagtcatggaggaaagtgcagcctggctggggtgtttagggagaggaagcctgatgccagaggtcaaggccatgacaggtaccaaatctgcccccacacattgttctctttccatcctgttgggtaaaacatacagatgtgagagatgggatctaagggatgggaggaaagtgggaaaaagctggggagaaagactaagtgatagttactaaaaataaaatttgctaagagcatgttttaaggatcgtggcagaaccagtcagtaataagggttgaaaaacaaagcatgaaaatgaggttaacctccctgttaacccaaactgaggtctccctggcttttattatcatggttatcgtaacacccagacacatggattggagtgtctggggaaatcccttcagtccgctccccaaccaccgcagctgtaggaaaccactaatctactttgtgtgaacctatttttaggtttctatagatttttctattctgagcatttaatacaaattaactcatacagtatgtaatcctttatgtctggcttttttgtatgcagcataatgattgtaaggttcctccatgttgtagcaggtatcagtagttcattcctttttattaccagtcaggcacttcttgactccctgaaaagggcatcccatcataaggcagtcaccggttcccaggcatggctggagcagggtgccatagagttagtgattttcctcaatcgtattggatctcagtggtctagataaagtcagcccggacacagccctctcagtttctctcatgccctgcttagcagcagctgttctctagctatatatccctgttatggttttgggtcctgggtcatgagtggtccttccattcatggccaccatgtacagttgtataggttgagtactgcacaaaggtgcccagctgaagaaggtacaagaaagcactcaaatgcaacctgtaccccttttgctaagccagaggctccagaatggtgctgtgtcagccagaggggagagtactttttttctaatgcattcaaggcttcctaagggcttcctaagggcagtcctttggatagcatgctgttgtctgtggcacttgccagggctcaggtcctggatccagttaacatgtcttatatttgagttaacaagattgaagtggtaggaagatagaggataaaatcacagatattttctgatttatggatttgttctcataagaaaatcttttccaatttgtgttcggagatctacacccctattttctccatcagtcctcttgtgagttctaacatctcttgctgttcccatctgtgtttctaactttgaggttgagcatttctgagattgaattggtattaaaaattaattttcacaaaagaagaaaatcatgactttcagatatcaaaatgaatatgtgttaaagattttattctactcctattcaatgaggggaccaggcagatgttataaccagttgaggacaggcaggacatggtggctcacacctgtaatcccagcactttgggatgccaaggtgaaaggatcacttgagcccaggaattcgagaccagcctgggcaacatagtaagactctgcctatacctgaaaaaaaaaaaaaaaagccaggcatggtgatgcctgtctgtagtcccagctactcaggaggctgaggtgggaggagcccttgagcctaggaggtagaggctgcagtgagccatgattgtgccactgcactccagtctgggcaacaaagggcaacaaagcaagaccctgtcttgaagaaacaaagacacaaacataaacaaaaaagaaaagaacagacacttacaggtcagtaatatttaaatgaatgtggaaacagaggcaaaactgtttttttccacaaaggcaggagagaagtcaatggaacttctcttggacaggacagaattttcatgtccatggacaggaattatttgcattgctgtcacttatgtacaatttacagaattataaaataacttctatatggtcagaatcagcttaccaagagtggcgttctctggagtctgtcaatgcatcccttgtagcagcatacttcattttcccctgcattggtaatttgtggtgtttctagcgcattgatgaacctaggtaagtttttaccattccacttgagatttcaagataagcacaccatttctttcatgtctgaagtagtctttggtatgttggtgttctctattagaggaggaaggatctggaagttttcaaaggaaactggtttatggaaagagcaaatggtggggatgtactgtgggttcgaagggaggcatgtgttagtctgttttcttgctgctgataaagatataactgagactgggaaatttataaagaaaaagaggtttaacagactcacagttccatgtggctggggaggcctcacaatcatgacagaaagcaaaaggcaagtcttatatggcagcaggcaagaaagaacttgtgcagggaaacccctccttataaaaccatcagatctcatgagacttattccttatcatgagaacagcatgggaaagacctgccccatgatttaattacctcccattgggttcctcccatgacatgtgggaattgtgggagctgcaattcaagatgagatctgggtggggatatagccaaaccatatcaagacacctggtaggccaccaactgggaaataaggtctggattttattcttaaaatcatcacacccttgctgtgtgacgtttgggcttggcatttatctccctgcttctgtgagacaggaaaataagtgttatttgtaaagtgtgttgaggttccctgatgaaagttaccagttaaccacaaagtagtgttatgaatctgccctttgtccgcttgctgggattggatgccctgggtacatttgtcttccacatctttcatctcttctcaccattcacttccgctgcagcaagtgggcaccctgccatgggcttacgtgttttcagcagctgcatttggatttttctatttacccttgaaacaatctgttataaaaagccttaaacatctcccagtttctttcctttcctctaaaatgtttaagtaaatagttgatggaataattattctaaatgtagtagagttcacattgtcttaaaagactggctaaaaataaaaaattggtcttgtcgaagcttaatgagattcttcagctttgctgtcccagtgctgcaggtggtgaagaggaaaatgctggagcttccaacaacaacacaccccccaaaaacctaaaaacaaaaaaaagtgtggaaacacttccaaaatctactcatctaaaatggactattcctattcatcatgaggggatcttcaggtgtattttcagtctatgaggaaaaagccacttttacaggaatgtctgtaacaaatttgtgatgtaatacagtgtctactccagtagcttcacttcatgaaactgaatagcagagggatggataatagtagctgaaagacttatttttccttttagctgtgacgctttaatgactttgctatccctcaactgtccccttgggtggaggttatattctttaacgaatcgtcatgtgattcttcacttttaccataccaaatcctatatactttgctttaatttttgctttgcttttggtgaccgcatatggcagagaaaatattttttgtcttcactgccattacaaatttccatagtcctgggttgaggctggatttcggagaccaccttgtttttttccaaatgcaggagagaggaaagtagtattagcagcagttcaatccagtgcacgaaatatttgttgcctgttgggatgcaatactacaactcatttacacttcacacatttatcacttttcttacttttgatagattatcttcccagccattctagccaaactgatcatctgcttctgaattcccaaggtgtttaatatctttcctactgatatttccatttaaccatatggaaatggttaaatggtctgatatggttgtttgtctatctgttgggcatttattttgtctctccatcagaaaaaatacattccttaaaggagagaatcatattttatatttctgttttgtcctctatagcacctatcaggtggccagagtcatagtagggtctgagaaaattcttttccatttgcttaaatgcaaatgacattgggtaaacttgtactaagtgacacagattgtcacaaaggtctacaacagagcatgctgattatatacatatcatcagaggacagacttgagaaactcagcatgctcatttttggatttgagctgcatgaacagctcttggtattgattaatggaaagatacaagcctttagttgtttggatggaaagaaaacatctctagcattcttttttctttgaactcttagaaactgaaaagtcccaacagtccatgtccaaaggcgtaactgcagacttcccaggcagctttggagatcatccttctccaattgtggtacttggggtcaagtgtagaagcagggagaccacttaggaggttattgtaataatctggtgaaagaccatgacactttgcatccaggttggggcagtgggagtggtgagaaatgtgatctgttgcatcgactttgatgtagagtcagttacatggagaagtgattggtgattccagaagttcagagaataagccccctggggaaggtcattttcagtgaggaggtcattcatgtccctgaaagtcagttgtctgtggcagagcttgggtgctggtgcttttgctgtggtccgtcccagcttctctggcaggttggcatgtggactgggtgttggagaaactgctgaggtcttcctttccctggggaggtagtatcaatgattcggaagttttaaaaatgcatcagcttgctggacagtgccctcaatcctggcccagacccatcgtggaaaagctatcatggtgcagcctctgcattttgcattagttgacctctttatggtaaggggccaagtctgaaccccagggagctgaggcccaggaatgctccttctcattagagtttggcctggaggtatggtcctgaaaactttgcaggtgagccctgttagtggctcctcaccccttcttctcctcccttgaaggagggagagcttcccccaaccatgctgggaaggcaaagctctcttaaggcaacgaccacttgctgagcacatctcagggcagagacaatgaagagaaggcatgaaccacacagccagctgacatctcaggaaggtgtgggagtttgaagaatccccgctgtgtgtcatttactggctacaggacattgggagaattacctaacagccctgggcctcagtttcctcagctataaagtggggataataataatagaactatcttctaaattttttgtggggattaaatggggaaatataagtaaaatatttagaatagtgcctggcacaaaatatgtaccatattttgtttgctattaatattttatagtattattcatttataatatgataggttatgtagtgtgtttggctattataaatatattgtgtgattagtatattctcaagccaggcccagtccccagcctttagaaacccactccctggggatctggttcagggtagttactgggtcaatctgtgtatgaacaaacctcacgcataatacagacatctcgaattgagtacctgctgagcctggatctgtgttggtaacttcacatccatgatccacaaatgtctgacatttattttagaggtgaagaagttgaataccagagggttaagtgacttccgcagggccacacagcaaggttaaaattaggtcccctgacgccaagcccctctctgtgatcaatgagtgtttcctgatgtctgcagtatgccctttgctgtgggaggcactctaggcagttattcctgaactggctcaagattctgagtttgcaagtcagggattaggcctaggcatctacctgttagcaggcccctgcaggaacttccagagcagatggcctcaatggcccaatggagacacaatgctagaaggtagacgaaggatggtctcagctcctgaggagtcttattacagaggtgatcatcaaattacatgaaaatgcccagcaggtgctgattctgtgcgtgtctgtgaggctcactctgagatgcagcagcctggttaagcggagaggactgtggtactcatgttgactcagcttagggaattaagatgccctgtgaatgtggagaggtggggcaagggcaaggaaggggggacaccgtttgaggaaggttcagaggcataaagaacttgacatgggacagggctggtgaggattccctctgggacatttcccccatcttcctagtgaagacccatcctgcaaaatccgtggatggaaagcagcgggcataacctcccagggtggattacataactgggctgggccttggctggggctgggcctcccttgccatccttttctcctggttctcaggtcctgtgctcctctcatctacctctctacctcctgctgagcagtgatggtggagcagggcaacctgctcacaacttcctgcaggagtggatgatgtgcatgtgttttgtggggtctgttgtagtcttatgtcttttgcctgtgagtggttaggccagctgtgccctcactaggggagcaacaattgggactatggcaatggaaggcagaccctgtgggcttttggaacttccttctttttcacccatcctcctaattttgcttctgtccataacacacaatagggcgttggacaagtcaattcctctctgggtcccagttttctcctctaaaatacaggcttacgactaggtgaccttgcttccttctcaaagtaacattcaatgacttttttgaacccaatctttggaacccctcttggtgttctgttcttttggctttgagaaggcttcctcctcctgtattagacagatactggagtaagagcccaggttttctgggtacattttcctttaaacctccaggcaaactggagctagtcaagacatcagaaagagtatcctgaagctcagggttgtgctttcagatcctacctcacaaatattcagttggtataggctctctgaggtctaagctgtccaaataagaaggatctgccttctgtgtggttgatccagttgcccatgaaggagactctgaaaagaaaagcccctccacactcaagataatgattgccaaggttttgcactaaaagcacacatctgcctgggactttatgagtgatggctgtgtgttagctgcaggaggcaacaggaggcaatctgcccgaatggtggacaccatggccagccaaggctgccccatctcggtcttcatcacttcccttctcagtttctctccccacaaaactcaccatgagatggcttctgcggcagtgaggtttaccatccaatagaaagaaaacccatggcagttggctaaccgaccaaacttactccatttcctctgacaatcgatagttattaatcacctacattctccagaaggctgtaaaccgccctcccttctgtgtctctgggatgacaaatggagtcggggttagccagcccggctttgtggcatccaatgtgtttgtgtttgtgctttgggcttgtcagttgcctttgctgggatgaaatagtggggcttccactaggcatggttcagcagctctgctagtgtctgtgctttattgggcaataaattaacagtgagcactgccaaggaaatagataaatggatagggtggcaagcacatttttaacaaggaaaatggcttcgtttctcagtagcatcatttaaatgattagctcagttgtgtagtttccttgattaggggatggggaggagatcttaaataaacatgtctgtaggaagaacattgtgggggcatcctcactgcccttctttggaaggtttagggaaggagaggggatttgtttaggaccctaggtctgggagagtcttgcattttagtcatgtgtgatacatgactaattctgcctgtgggttaagcctataaatagtgtgtgattctggctggccatatctggaggctataatcaggatagtcatacttgaaagagttaggagaaatcttttatggcttgtcatgatccttaactgcatccccatggtaaacagtggcaagagggaagagagggaactctttgtttgcaaggcaaatctccacaaagctaagaggaatgctagccatcagtacaaaggaaaaccttccaggctcaagagaagggcagtagaaaacaaaaacatgaatgcctcctttccatgtatgtacacgtaaacataaaagggtgcctgctttttcataactaatttctagaagtggtgccttccccactagaatatcatctgaataaggggtctttgtcatgtgttctctgtgatagcccctgtgctgggaatggtgcccagcatatagtaagaaatcaacaaatacacgtggaataaatgaacttacaggtggactgctttccaccctccaaattctatccatgattcctttacagcttaattacacttccaccaggtccttccccagccactcctgcctgaaggactgtcctctcctctgctcaccagttatctcttcttttcctttttattggaaattgagaccttgttttggaccatgttttctattgtttcaatttgacattaaaatcttatagtattgatctcttttatatccattccacaaaccttttcaggttgctataaaattttttatctgtgtttctctaggaatagatgagttgcctgaatgtgaattcaattcatcttgcaagtataatagcttatcataataagctcttcatgtaatgtaataagtacttcagaaaataatttagcctttactggattttttttcccttcaaatgattggtttgtatgcttaatcactcaagaactcagctttctggtagaaattgaacttgtatttgcctgtgaccaacctactgatttttgttttagaaaaacagaaacaaagggagaataagagagaggcaggaggaaagaaaatgagagagagaaaaaagatgaatgtatatttacatctatagcttacttcacaataggttttgaggacttatttacagctaccttatagaagatatttacaaaaagtaagtgctataggttttgaaatcagagaaaagggtagatgaatagatgcttctgctttagggaatgtatcttggtaacttctgataaaggaagctttttaagctttctcttctctggcgcttataataggtccatgttttggtagggggtctagaagaaatagcagctctttgccaagggattgcttattggaacaaatcatttgcaatagaaatgtgtttactaagataagtgccattttaaatgtagtgtgctgtacccctggcaaggaatcttaaaggtgactcaaagcctttttgaaacactgccatataattaaagaaaaccaacttaatgatctaacatttagcattattctttacagttttacacttggactggaaaacagttgcaaaaatagcttcatttaattaggatgagaaacataatacacatatatagatgcatgtgtatatatatatatatttacttcattttaaaaattattatttgtagaaatagtctagtatgtgtgaccaagaaaattaatttaagatttgtgctttattcttcccagtcattcatcaacaagtattcattgaggatgcaagaggacctcaggagggatgtacattcaagacataccatcaaaggggcttattgtctagttggggagataagacatatacacaaaaatagttaactgtatgtatcaagtattatggaattgactgccttcaaaatatgaaagatggaaagtgctttggaatatcaagcaaggggaaataggaacctatactttaaggagggtattcattcattcattcaacaattgtatataaagcatgtactgtgttctaggtactcacacctgggtgctagagatacagcaaggactgaacagaccaggtctgtgtccttacagaatttattttcttttgaggttaggcaagcaatagacaagtaagaagtaagtcaacaatgtgatttcagggaatgataagccaatgaaggaaatgaaacagtgtgaggggacaggccagtgctgtgtgcacctaactgcatgtacttgcttgctcacaactcagtcgtgctttagaaaggatagtcaggaaaggccttgtaggaggagctggcctggactcagacctgaataaggagaaataacctggagaagggatggcattctgtcctcaccttggagggtcaggaagatatggtttggaggataggaaagggacagacattctagaacatttcagagtatctgagctttttttttcccccagggtgtggggttgtggtgttttgcatcaggtaaggctcaggtgaatcaatgtataattttggcagccagaaggctgggagctgttcacaatgagagattttttttgcatcttccagtaaggccattctgggatgaaagatgtcagagtgtctggcaaccaactggcagccattgaactggggatttatttagcacttacttctagagagcttgctatgtgccaggcactgttttgagtgttttacaaacatattaacttactcaatccttacacctctttgtggtagatgctcatcttcggctcctctgtcagaggcaggaactgagccttgagagttacctgctctaggccacatctctgggaggtgttctagttatgctgttctagcccttaactcttgtgcttcttttttgtgagacgagagagcacccatgtcactcaggacacttctaagtgtctctagcctggaccagcagaatgagagttgggaccttttctaattatttaagggatctaaggactttccaccctgatggaaacattctcagtctgcccagtatggtacccacttgcaacatgtgcccattgggcacttcagtgtagccagtgcaactgaggaactgagtttttaatttgtgtttaactttaattaacaaaaatataaacctaaaaactgaaggaatataaaatgtttgtctgttaaacaatactttgttgttttggtaggactaattttcacaagatgcaacaattgttgcaacacatgaaacactgttatatttcagtgggggtgtcaggtgcatgaagtatttctagtatctcattaggaatttttaatattaatgacatgttgaagtaaaaatattctggatatattgggttaaatatgaaacactttacacactaatattatatgtttcttttttttgaaatgtggctaactgggacattcaaaattacaaatgtggcttgaatctttgaatatttctattagagggagctgggatgaagtttaccctcaagcctctaaaaagagcgcttgggccaggcacggtgcctcaacgcctgtaatcccagcactttgggaggccgaggcaggccaatcacttagtgaaaccccaactctactgaaaaaaaaaaaaaattagctaggtgtggtggtgtgcacctgtagtcccagctacttgagtggctgtggcatgagaaccgctggaacccaggaggcagaggttgcagtgagctgacattgcactaccgcactctagcctgggcaacagagcaagaccctggaaaaaaaaaaaagaaagagagagagagagaaaagaaaagaaaagaaagaaaggaaagaaaggaaagaaagagagcttgaacaaagaggaaataacggctgtgttttgggtggacattgagccatcatcctaagcaccagttctcccggacttctgggctcttgctgagctcactccagttcccagttccccgggaccaacatgcaccactatttcttgggttttgcagatggaattgccacatggatagagattggtgggaactcatacatgaacacaacccccattttgctcaaaaatggtgtggatttagttggagttagagagtctctcaaccatatgtgacttctgccttctgcccttgcctgttccttgacaaggaatgaggcctgcattgccactggcaggaagcagctatccacccagcacaatgcttgagggccaaatcctgcacctggtcccagaggtgcccaaaagcaggaggtgagagggctgtgcttgcttgagggaccccacagagccagggaacagcctgccaaagcaactcaggctactgaaatccaagtggcagcaaatggccaatcattgtctgggtctggctctgtcccagcctctacttacctgtatctcctcagaggtacagcttggggcagcctccctatcaccgtggtttcaaggagaggtgtgggtttgtataggggagatggggctcctccataactgagtcaactgaagactcctccagggtcactcaagtggggacattgaagaccaggtagctgcccacttcgccagtgcagagacctgagtcccaggcagcccagatccctggagatagtcacatgttccatttgctctgctgtgttagcattaagatcccacccattggctgttcaggtggccacggccctgactgcacactggaattacttggggagctttctttttctaatacatcagaaaaatactgatacctggtcttccccacagagatgctgatgtaattgctctggggtgtaacctgacaatccaggttttaaaaactctgaatgaagttatctttccctgagaggatatggtgcattgaaatgaactttctcaaagtgcttcagaattacagcagatgggggtgcagggtgcctgttgaaaatgcagagttctaagctgttcatcagacctttggaatcagaatatttggaaatgcacttgtaacctacagcccaagtggatattcagtaggctgccatttcaacatcaccctgtgaaatcattaacaactcagtatggatttgctccttattccttgtgctttttaagaagtccaagaaagagagttaaggtaaaattgaaaggaagtaatctctaatggtgaaatttcaggctcttagatagagaatacttttcggggaaagggggtcttctagaagcccctgaaatgaagacaaggagtgaccaccaactccttgagccagaactggggcagttcttcacttggggactctgcccttgtgcagtgggaaagcagcttatatcaaggcttggccaggcctcctttggtcccaggctggggactgctgggacttctgccacaagatgcttggattgtgtttctttgcattggtgcagcgtctcctggagactgcttttgttcagtcactactgaggcgtgtattcattaaatcactgtgcgcactaaggtagcagtgcagagacaccctctctgtcaaaattgagccagcccatcctgcatggtcttaagttttcctgagaaaagtagccataagcgatgggctcccactactccctgctttattacttgaggtacagagagcatatgacacattcgaaccccatgtgagttagagttcagtatgggatcagaggctggtttactcttttcaccgggaagcgatcttgagaagcctgcggatgccacttcccatgacctgaggggctgtgttttatggactgcttttgatctgaaatctagagatccctgttttcatccttgtaagcctccagtaactcaatcacagtagagcagtccccatcatctccagcaatttattaatcatgttcaatgccagacaaggccttaaaaaaacaacacttactcatcagcagaccactagcagcatggaaatgctactggcttctctcggagaatctcctatactctgcgaacagcatgagtgtctgtgtgtgtgtgttttagtgtgtgtgtgcctgtgtgtaggcacagaactatggaggttttagacattgtcgttcgcctgctggtatatcaggttactaaacagagaactagaaactctcctagagtggctacaggagcactgcagattctcaactgtgcttccccatcttctcctggatgtttggcagccagtgtgtcaggatgtattaggcctctctccaaggacccaagtgcaacttaaattggatgaccatattctttggcatctactcagggcacttgtgagagtggaaaggaggtgctcttaataattattccaggacatcaagcaaactgggaagtagagtctccttaggcatattcacttggcagggtctactgtcaagaagcgtctattcttggcttattaaaatgccatcagaaatcagtcagcattctgatataacagggaattccttttatggtattcttggcaggtgatctcctgtgtcaacttaaatgtccccagggactgaaagctcagtgccacatgcagcagccattctattgttggatgattgtcacattagattgggactcattagaagacttttctgatatgagattggaaaatatgctaataatatgtacagtgatgcaggcaacttaaaattttcttggagagaaagagagggttgctatggtttgggaaaatgagtggggccgatgcttaccctttgtgaacccatttttggagggtgcagccatcacagcgatccaagaaaaatcttcctgccttggatgctctttcaccaaataactctggaaagctgatgagatgaaacagagtttcacaagggaaagtggagaagaagtttctgagagacaggaggatttatacccaccaattcaggaaggagctttggagtcatggattaaaagaacaaaggcagggagtccgacctggatttgagactaagctctgcctcttatacagggcatttaagctctctgggcctcagttgctccacctttagaatggagatgcctcttcctttttgaagacagtgggtcctccctcaattgaattcagtgggacttcatcgcttgctccacacagagctcctccccagtctgtcacattgagtgcaaaactctgcctaggtccatccagtcactcaacaagcatccatgggggaagcattaaggagctttagatgcactgggttctgtgagagcaatgttagtcttcatcttcttcactccttctcatcctccttccatggaacacccctagactccacagcctgcaaagctcattgccccttctctggagagtcctcctaattcatgtgcaaattttactcactagtggggtcatttgttgagtgtctgtccctacttcagactgtaaggttcatgagggcaagggctgtggctctttggtcctctgctgcatattcaggcttagcacaaagcttggtatacagcagtcatttaataaatatacattgattgaataaatgaatgagtgaatggtggggccacagccatgattgataccctttccatcctcaaggaggagatcacagacaagagactcagaagaaaactcatgactacaataaagagtaagaagtgctttgtttaaagcatccttggggtctttcaagaggtcccttgggtgaagtagcagattcagggtaattagggaagcctaagagttgatctttctgtgcctgaatggattgattattcaatagaagaaaagaaaagaaacaacaagacttaaacctattcaactaccctgtgtacttgaaatgtcatttaaagtaaaatctagcatggcaacttcaaataacaaacataggtaatgctggagagggtgcgccaagctggccagcattcttacgaagtttggctggcacagagcacacaagagaagtcatattattgccaaaaagttcttgcagtgggtggaacctggacaaagggagctgttctctcccctctaagtcttagatatagctgggaaaaacagacagagtcatgaccctgggttcctttgtttttggaagtcatgtggacattcttcttttttagcactgtttctttctaatgataaaggaaacagtatattgatgaactcctatttttcatttgtggtgctttctgaatgctttctttggaacccaaagtctcctcagccacacctttacaagttttatggttctgggtggaagcatgttttcagaaatctaagcctacgaggtattttttttttttttggcaggttttcactctcattgcccaggttggagtgcagtggtgctatctcagctcactgcaacctccgcctcccaggctcaagggattctcttgcctcagcctcctgaatagcagggattacaggtgcccaccactgcacctggctaatttttgtattttttatagaaatgggatttcaccatgttgcccaggctggtcttgaactcctgagctcaagtgaactgcccatctcggcctcccaaagtgctgggattataggcatgagccacagcacccagcctaagcctatgtatttttgttttgttttgttttgttttgtttttagcagccatggcatcatggttaaattcatgaggtacctttcaatggagatgatatttcaactttaattaaaaaccaaacaccttgctggcattgtccagcccaatgaactagactctgaaaatgattttgaacaataattcaagataaagagctccagccggttttctcccctttggaagccttcaaagtatatttttatagatatattaaagagattttgtccaaatggcacatacctaaacagtttaaaatgtttttatacccatgttcaaagaaaaagaatatcttgaaagaataaactttttatcttttataaataaggttaaaagcagtaattctcaaaatgtggtctctgaaccagcagcatcagcatcacctgaaacttattagaaatgcacattctggcagggtgcagtggctcacgcctgtaatcccagcactttgggagaccaaggcggttggatcatttgaggtcaggagtttgagaccagcttggccaacatggtgaaaccccgtctctacttaaaatacaaaacttagctgggcgtggtggtgcacacctgtaatcccaggtacttgggaggctgagacaggagaatcacttgaacctgggaggcagaagttgcagtgagatgagattgtgccactgcactctagcctgggcaatagagtgaaaccctgtctcaggaaaaaaaaaaaagagtcttttgatgctatgaacatcatctggcttctggcatcctgctttgcccgagaatgaaaattccagttccagttccagaaaaaaagggcattcttcagttttgtgtcccctgccaggtcaactctgaacctgtagtggatactcagcaactttgtgcactgaatgaatgaatgaatgacttgtaggctggtgtgggaggttaagagaaatttattctagcacataaagatcttctgatggagtggatgagggatggaaattggtgatcaggctggggctgtgctgaaatatgcaggcgggttatgacagcaagagaccgtaaaccctgaaaggatgaaggttctcctcacatataaatttgacacatggaaaaaccatgcagtaagcttaagggagcccacctcaattctgatttcttcctgataactatgtcaaagctcttaaaactgtgcaatgaaagatctccacgcattttctggcccttgtcttgccaattctttcactgtgtacctggtgtgcctggtctgctgaactatgaagcatactcgaacatcatacacatgatcttcctttttaaaaatgaccttgagaagataacaagtgacattctacagacagactccatttcttctcttttgtttgcaaaagtgtgaggctgaaggaggaaggaaagcttgggttacctgaccacattctcatccacccaccctcaaacaaatgccccacacatgtagaggatgtggttttctgactgtttatctccagtgagccagagctctaggtcccctgtgctagagggggcacagaggcattattatcacccagtcctcactgggtgagagggagaatggtgagaccattgtaggaagcaaggtggaatcaggggctgtgggccaggctttcgaaacttgcgcgaatacacatgcagaggtttatgctgctgactctgccttccaactttccaggctgtaggagtgggaatttattgagcatgagggatgctatcttgtgaaactttctacttcattcgggaagggtagtttgtctgtaagaattcaattgtaaatacaaaaataccatttatttctgaggtgagggcaggaaggagagatgtcagaagtagacaggttagggctttctctttggagacctggatttcaacccactgaaagtcttaacaaagaggcatgctagtatcattcttagcaagcccagtccattgttatggtcagattcgattctgcagaggagaaaatggagtgtgacatgtttggtgccaggaatgtgagcatgcacctgcacagccgatgttggtgtcatatcgtcagctgaatggtcatttagcaattttggccaactcccttgacactatagggcttagatggcattgctttctgggatgcactgataagccttttacataagccttttacaaagtaagaccttggtgccaaaatccttgctgtagaagatgaaaattttatgttatttctaggggtgctttcaatgttccattaagccactgaggagctacaaccaagcttgaccttgaggtttagtcttagggaccagatgccctctgtgtgtttcattatcttccagaggaaattgttgagtgtttgtaaagtggttataggatgaagggaacactcttttaaagttcctaattatatcttggactttagctacagttaccgaaagacaaaataaggtctctaaaaaaatcatagccaactttgggcattggttgtagactagagtgcagtgcaagggaaaggcgggacacacataacatctctgtggctacatggggatagattctggaaatgaaaggagaaattccagcatcctagggggtaagatcaatgctctagagagggaagagtcacttgcatgtaatacaagtttcttggagatacccactgccattgaattgagagatgtcagtattcctgtgggagggttatgatgtttgagtttttaaatatacatatgcttctgaattctacttgtgggttctcagaattttccttccattttgtaaattgcagtaaaatatgcataagatttaccatttcagccatttgtaagggtacaattcagtggcttttagtacattcacattgtgcaatcatcatcactatctgtactagttatttgcattgccataaaggaatacctgaagatgggtaatttataaagaaaagagatttatcttggttcatggttctgcaggctgtacaagcatggcacccacttctgcttggcttctggtaaggacttcaggaagcttacaatcatggcggaaggcaaagggagagctggtgtatcacatggcaagagagggagcaggagcaaggggacaagaaagaagtgcagaggtcccagactcttttaaacaatcatatctctcactaactcattaccactggaaggacaccaagccattcatgagggatccacccccatgaccaaaacgcctcccatcaggcctcacctccaacactgggggtcatgtttcaacaggatatttggaggagggaagacatccaaaccatatcaccatccatatccagaactgttttcatcttacaaaacagaaactctgtacccattaaacaataattccccacttctccctctctcccacttccaaggaaccatcattctacttcctgtctcaatgaatgtgactactctagttacctcctttaggtagattcacacaatatttgtccttttatgtatagcttatttcacttagcataatgtcttcaagggtcattcacgtcgtagtatggaccagaatttccttctttattaacactgaatagtattccattgtatggagagatctcatcttgtttatccattcatctgtccatggacactttgggttgcttctaccttttggctgcaacaaacatgggcatataagtatttgtttgagtcccagctttaaattccagttttgcctttaatgtaatttaacaactggcagggtttgagaagtagggcaaagatagccacaaatttagtccttggtgacagtgagtggcaacttctgacctgactacgctacagaagatttctcatctcataaacctaattaaattaaaaatccagttggccaaacccacatgcacttaagtcagacaatttcttaaaaagctcattagctgcaaacttgagcgctccaccagcagatggaactttttcccctaggtttttcaatacttggacaggaaaggtcttccaactttagacctcaaatggaagattttatcatgcttgccagtgcatcggttttaatgtcattggtaaaattatgcaaaaagcaaccttttaagttttatgatgcaatgatgtaagatttcagtgtcattaaacctcggcttgcaggaaggacacaggttttagggaaagttttctgacttcctgttacaactgctttccctcatttcagttataataaattaagccctaggaggaatatattgaacttttctgtatttttaatttgggcaaaatgagatgaacatcatcaacaaaatccaggatgtaggacaacactcctgcgatgtttggggaacacgaacctgcagaagttcacataactctggccctatagttatgtcacaggcctcagaagggaagagattgggcaattggcttgtagtaatcatgtcccagattcttctttggggagcattaaaaaatgagaattcagacactgtgtctatctgcatgagtcaagttttcttctgccctctcaaaaaaaagtccatgattgcagttaactttgtctatatactgatggatgcatgatttatagtaaacttatagtaagagggaaccctgttgtttcccagggtttcgtatgtatttatagtcactttgaagtgacctgatttgaaaatggacagagacaaactgctggggggcatgcaggtggttaataaatactgatagagacccccaggtggttaataaatactgacagagacccggtctttctgattagaggaatcacagtttgtctctgtgccccttgcagcgtgtttgtgtgcatacaaatacacacaaatatattcacttattattggaacgttggcatttccattattttatgcctctccatctcactttcttatgacatctgttttcacagattcctagtcctgattcaaatctgaattctctgcttcttcacgtaatgctccctatatctgccacctcagttgaatctgtttttcctagagacatagttgtttccctcactcctctctctggaggttgctgtttctgtttttgtttgttttttgtttgtttgtttgttttttgagatggagtctcgctctgttgcccaggctggagtacagtggtatgatctcagctcactgcaacctccaccactggggttcaagcaattttcatgcctcagcctccccagtagctgggaatagaggtgcacagcaccacgcccaactaatttttgtacttttagtagagatgggttttcaccatgttgcccaggctggtcttgaactcctgacctcaggtgacccacctgcctccacctcccaaagtactgggattacagacatgagccaccatgccgggccatctttgtaacccaggagtgctggacactctggcccttcattgcccttctgttcttgtagaaacctgttttctccaggctcctgccatccgaccaaatccttcctctctctgtccttcctgatgctgtcacccatctaagtccaggcccctccccctattcagggatggccctgtcctcttctattctcaacctcagctccccccatcccctttgagtctgtgtgcaggactgtccttgctatccctgtgtgtgtctcagaccctcgacctctaccaccgcggtgctcttcttcctgctccactttcaccagggatcccctggatgctgccattacctggaactgcatctcacctttattccgggttataaacttcagggtctcactcagtgagggtaatccatgtttctcccacctctcttttgcttccactacactcagtcttcaaactaattctccagccttttctccacatatttatttatttaacaaatactgattgagacactttgctactttcttggaatttcgtgataactaaaaatggacacacacccggccttcatagaacttgccatccagcaaaggaaagaggagagcaattgatcaaaatgattgcacaaagacatgtaaaattgctgctttgctaactgctacacaaaacagaatacctgtgggcagggaagtgacagcagagctgatttctgaaggatgggcatcccatgtgagcaggtgaggcttctgggaggaggaaagtgcttgtgcgaaggctctgtggtggttggggtgggaggaggcaaatggagaatgagaataactgcaagttagattcctggagtctagatgtggaagcatgtgaaataaagccagagaggaggaaaagaccagagctttcagggccttgtggactctgtcaaggattttttttttcttcataccaaaagttatggaggacatttgaggtgatttaaggagggattctctccgatttacatgtgtgtcctaagaattcagtccattgcacacagagtatggcttcatagtattgcacttttggaagcaccagatcctaatgcctgtaaaatcatagagatttttactaggtttccttacatgtgaacaaatcagttttactcttatctggcaatcccatgcattttattttaatgctataatcccaaataccaactacaaagcccctctttcttcttcctttctttcatcttgaatacatctctacttaatccgttgtttggagtcttggtttccagtgaatcaatttacagcatttttgtgcatgtgcttccataagtcaaatgtgatgtttcatagtgctagcttggtaatttaggggacctatggatgattaaatggctctgcagaaatattacagatatttttaaatgtatgataacaaaaatccttttttggtggcaagattatatattatatatatatttttttgagacagagtctcgctctgttgcccaggctgcagtgcagtggcgttatctcggcttgctgaaacctccgtttcctgggttcaagcaattctcctgcctcagcctcctgagtagctgggattacaggtgtgtgccaccacacccagctaatttctgtatttttagtagagatggggtttcaccgtattggccaggctggtcttgagctcctgatctcaagtaatccacccgcctcagcctcccaaagtgttgggattataggcatgagccaccgcacctggcctatatcttcttctattgagaaccattcatgacttaggaatgacaagaacatatcaactatacttgctaaacagtaaagagaaaaaaatcattttctttttcccttaggaaaacactgagactcagtctgagcttctggaaggctaaagcctgcaaaaacatgggcttttcaaagctcacagaggcaaggagagggaggcgatgggtcagaccaccactcaattttctgtagtgatggcagagctgagacccagactcaggagaaagctgatccatggcccttctatgtcttgtgttagttttgtgggatgacattctgcatgagcaattgattgtgctgctggaaacacaaactatgaatctgagtgtctatggagtttattcttgtgatcttatgaaacaagtctcctgcatacagatttagggacaggcatattgtcagcatgttgaatcagacttatgtatacatggtttacagttagcataagtgagggctaccttttcaagccaaaagtttttagttcctaccaaggtcccatctcataatcatctgtttcaatctcattatttcacagattgggaaacttagacccagagagattaggtgacgtgcttaagagcatgttgcttataggggcagagtggagattcacacccaggtcttctgtgtcctgtgctcttccttctccacatcactcatcctgtgtgcctggttatattagtccgttttcacactgctgataaagacatacccaatactgtgtaatttataaagaaaaagaggtttaatggactcacagttccacgtggctggggaggcctaacaatcatggcggaaggcaaggaggagcaagtcacatcttacatgttggcagggaagagagagagcttgtgcagggaaactcccctttataaaaccatctgatcttgtgagacttattcactatcacaggaacagcatgggaaagacccgcccccatgattcaattacctcccaccaggtccctcccacaacacgtgggaattgtgagagcgacagttcaagataagatttgggtggggacacagccaaaccatatcactggtgtctgtcctttcctagaacagccaggtggacttggaatgtcaaaaattcttcttcctttttccttggttttccatttctcactttctctccccgttccactttgggagtctgaaatgagggtggtgttgcttctctgcctgatctgatccttcctttatatcctggagatgactgttgatatgtgtagcgcttcttacattcagaagggactcttgagtaatttaaacttctagatcccatgctccctgagggcaaaggccaggccagacttaactgtttcagttttgcatttctctgtctctcactctggcccttgtgcataggtgttcaataaatgtttgttggcattgttattaataaattcaccaggacaaaaacattataatttagatgttggaatgatattatctctcaaaaaacaaaatgtcaccagattgttttgccttgggagttctcacatctatttttttcttttttgtgtgtgtgagacagggtcttgccttgtcacccacgttggagtgtagtggtttgatcacagctcaactgcagcttccacctcccaggctcaagcgatcctcctgactcaccctctggagtagctgggattataggcacatgctatcatgcctggataatttttttaaagttttttttgtagagatatggtctctctatgttgcccaggctggtctcgaactcctgagctcaagcaatcttcctgccttggcctcccaaagtgtattttttaatatagtggattttattatatgtaaattatatacttcaatttaaaaagtcctatgcctttgggatcatatatagaaaattgtccattttctgagaagggtctctgccttcagtaggcagataaaccctgatcaaacatgcagaatcattaattagggtcatttgttctgctgtgagctgagaagaatgtgtaaaacctgctcaggagagaattaattcatcctcctctctgtactttttctagtactcctagcacgattctctaagcctgcaggcctcatacatatgttctaatgggctaattgttaaggcgacatttgtagattaatctctgacttgagctaagtggtttctcctaatggctttaattcagtgactcccattgtcagattcactggaggagcttgttaaaaagaggtgcccagacttcccctcccccagctcatgatttgctggccctagggtgggatgagggcatctctgctttggaaggaaagctcctcaggtgactggattctggtggtagccacctttgtgagccttggctctgaatctgcctcccaaggccgtgaagcctcacacacccgctgaaagcatatgggcctaattgcagcaactccagtccaggttctagaacaggaaatatttctaagagccagctttcccaactcaatcacctctatactcacatcactgaatctgcctttttcctgaagtgctccatcacctgagggggaatagtctatgcttggctgtgctattgtccattttcatgaactttcatgaaccttgtcagacatttgaaagatcttcatggtccaccgggattttcatctagcgagatggctatggacttcccctctctcctccccattttgcaccaggctccttctttgcatcaggtgttagggacagatttttttttttttttttttgagatggagtctcactctgttgcccaggctggagtgcaatggcaccatctcggctaactgcaacctctgcctcccaagttcaagagattcttctgcctcatcctcctgagtagctgggaatacaggtgagcgccaccatgcctggctaactttttatatttttagtagagacagggtttcaccatattggccaggctggtctcgaactcctgacctcgtgatccccccacctcggcctcccaaagtgctgggattacaggtgtgagccaccatgcccagcccacttttatatttttttattttgctttttttggagacagagtctcacttcgttgtccaggctggagtgtagtggcatactcttggctcactgcaacctctgcctccagggttcaagtgattctcctgtttcaacttcccaagtagctgggactacaggtgtgcaccaccacaactgctaatttttgcattttttggtagagccagggtttcactgtgttggacaggctggtctagaactcctggcctcaagtgatccacctgtcatggcctcccaaagtgctgggattacaggcatgagccactgcaccctgcccttaaaaaaaaatacaccgtgtatgtgtgttcctggcattcttttgtgcaaacacatgtcttgtttgatcttggagttttgaaaatagatgactcaaacaccattgttccaatgacatttatcaaattgcttttgtttttaggaatctggcacaccgagtactcaatatctccacacagtatatgggtgttttcagtaaatctgagaaggtgacaattcatactgtccaagatggctgaggtaatttgttgagctcagactatggcaagtttagcaaccaggacaggctctcaagcaagctagcagaagtgccctaagaggcaatgctcaaattatctgtgtatcacactgctgcccccaagcccttgtgtgggacaatgctttgttacatgcttggttattgtcttattctatgactcagctgctgtagggcagggatgctttgctttctggggtactgtgctttccttggcctcattttaccatgtcccttgggcttctgtcctccttgtccctgaaactatagaagcttgcaaaaggattcccaatggcctcagcccttcgtgaagagatattagagtagtggtactatgtagaaaggaaggacattttgggaaaggagaggatattgagataagggccctactttttctatctttacccagttactaatgatccatctaggcaatagttcattttatattggctaaacctgtactatatgatttatcactaattgcataatagcatgggattaatctacagaagaatgactctataaaaaagagtatattttgccaggtgcagtggctcatgcctgtaatcccaacacttggggaggctgagccaggtggttcacttgaggtcaggagtttgagaccagcctggccaacatggtgaaaccccctctctactaaaaatacaaaaaattagccgggtatggtggcaggcacctgtagtcccagctacttgggaggctgaggcaagataattgcttgaacctgggaggcagaggttgcagtgaactgagatcgcgccactgcactccagcctgggcgacagaacgaggatctgtctaaaaaaaaaaaaaaaagagtatatttcatgactccaagtggcctcccatcttctgtttttcttgggccttatgtataggatatgttaaatacttaggtgactatttggggtgctctataataataccattaccatgcagactaaaatgtaatcattttgtgttttcaaacttagagttctcagacaatggggatttgttagagagatagagaaagagagagactaaactgacacttctaaggtggctttgctaggggcctagagaagacaagtctctgatggggattctattttcatggccacatccaaagtattgatgtgttttctgcagcacctggatctgggctgacaatgtgatcaagcctgacacgataaagaggcatttagcaagtttcaagactacgtgcacagttaccttaatactgagaggcagatcatctccccagggagcatttcatcgtacatcatggggcagtttgcctatcctgtatctcattgagaggaggccttccagctgaatacgtggacccaaatgcatgtccattcaacagagtcttcagggccagggagctgtggaggttatttccctcctggatttcttccctctcttaccctatcagagagatgctgatatttgagttttcatcttcagagggtagcaggattcctggcctcctcctgtcactggctgatttgcttaaataaggaatgcattagtccccatcactgactccaagtggaggcagctggagcaaattaggatcagctacattggccatctggatgctgcgaaatcattgccattgcaggggtcttagattttgagttccttacagaatgatgtagatgccatttgcaagggcttctttccagtccttttctgcaacagtggctttgggtggcataggcctatatagccagctctgacagatgctcagcattcacagatacacacacagggagccaaatggacagggattagtcttaaatcagctgtttatgaatggagaagaggcccttctcctgggttctggccacaccccttctctttgcagctttttgagaatgaggtcagggccaggatctaactgcttatgcctcagaaatagcagcacagatcaaaattaatcttaagctttttgttttgctgcctcctttagataatagaggaaaaagcgaaggcctgctcatgtttttgtttgcttgtttttgtgtgtacctttgaaaggaacatatgaatgaatatgtgtgatgggaggggttgaggtgaggcagctaagagggattagtgctgggcgggtgataattactgatagactgcagcattcaattggagcatgttttagttgtttttttttttaaatggcagaatgaaataaacctcagtggtgtattgttttagcacctccctttatatggagattttatcagttgctatgaaactgcatattccttttacagtgtccaattgtttttaatggtcattttctgggctgtgcaagccaccattctgccccaggagctccatgcagttttgcaatgctttaaatgagtatctcatgcagatttcattttctgtcagccactttggcacacataaaaaatacaggagtgtgtgtgtgtgtgggtgggtgtaaaagagagagattctgtctctcatacatacacaggcacacgtgcccgcacacacacacacacacacacacacacacacaaagcttgatcatgcttagtctttacataaattgggattcctctctacccaccagccaaggcctgagagatgtcaatagatggacactgaggagactgacttccaatgcccttcagcctgcagtctcttcagggtattagcatacctggaaaggttgacctagcagccaggcattgtgtgtaatggtggtgcttactttttattctcaggcttaattgttggctgaaagcatcttctttatttctgactatcctttatttgcattaatagtctcctctgtgaaagattaaagaaagtagaatgtgtactgaggacagaagtgtcagtgtcagcctaatctgctacatattcattctatggaccttagcatgacaggtatccactgaaggagatgccaaaactgtcttccatccatggagattaattttgagtgaagagtgtaaagtaggacaaggattgtcacataactggcctaatggattgcctaattgacttcctgaactggaactactttcctaaatatttcagaagtgttctaatcatatagatcatacatgcagtgaatatatctttatgtatgtccacacatacacacacggacatttgtacgagcaaatttgtgatcttcaaattggtatctcttatgtagtgacagaaagtagattagtgtggtctggggcttggaaatgggaaaggggattgatttaacaggcatgagggatcttactgggatgatgaaaatgttctgaaactggattacagtgatgattgcataacttagtagatttactaaagtcattgatgaattgtactttttaaatgggtgaatattgtggtatgtaaattatgcctcaatgaagctgttaaagttgatattcctctattggagttcctgcagatcctagactacatataatattaaaaattgtatcaccctaaattttcacctgcttttttcccactgaagtttatcaactacaattgcagagaagctggacttcgagataacagggtcagataaaaacccagtgccctgagacataaaaggctaccctgacccctattggcaaggagcgaggttgctgcccattgctgtatgaagagccaaacctgaagcagtaatggggggctggggatgagggtgagatttccaagcaggtccccaagggcaatgggcaccgtatttcaaagctgcttcggtatgtgtcaaaaaacccaaacatcctgaggtccaactcttaagtgatggcattctcctcttcttttacaggttgtcttagtctttgctctcagcatcggtgcacttgtaatatacttcatagattcatcaaagtgagtattcaaatatactttcttgccctcgtttcataaacaatcatgagcctttacattgatccatttatttaccttgacaccaacctttgcaagaccttctgagtgcagaagattttggaggaagctagtgctgtactgtactgattttctaaatgggaaagaaagttctcagaaggaaggctattttgagtctgctggcataggagggtgaggtatatgaggtcaagtcttcttgctgggtattacttatttttaaagagctgtttcctaatgatgtatttgcactgaagatgtcaagtagttaagatgacttgatgggaatttgcaacttctgggagggtgacagtttcccacagatgagggtctgagccattcttgctatggttgtaggatccttttctcaattgggtttccaatgctttgatcttactggaggtcagattagaaagcatgatgctatcctttcacctgccaatcgggtattcagctgaagcattgcacgctggtgcttcttgacttgtgaaggtaaggagatggatggaggagttcatcatgacccccagaggtggaggccctggccatttgaggacttctagagtggacactcatgcagactccttgggtgccagccgaatggactggtgctccagagtgagcctgggtgacagatgataaagaccttgcagaaggatgaagagggcacagactagaactgcaatgttgcagccagttctgccctgattcctgcaggtgccaaccctgaggaaataatttgttccaactatactattgcaaatcatgaagttgatggcatctgggaaacaagctggagtctaactcattttctgttgtggcgtgaacttggcaactctggtgacaatggccttgagcttgttgcctttattgtccactgtgtgagtgttttgaactttaaactctatccctggcatggttggctactagactttgatactaggaaacctgcttggtgtgcctgttggctcagactctggtgtgcctgaattctgagcttagtgctcctttcctgtggcttgggatggtggtaatttcatgcacagctaaactcagaatttctcagagccatctggtcaccggccaaggattttgtgcatttgggtggagaggccaaaatgtcagtcagggaaaacaaagcaaatatctcctttaataacctgtctctgggaatcagccaagtttaagcctatcagaggtccttcagcccaccccacatgcgaggctgggctgccctcacccatctcagatggagagtcctttaaacgctgtcaggagacaagattccacatgctccctccatcagctctcccgagccaagaaagagaagagcttgtttaagtttggaagactcccattggcatgtcattgaaggtaagcccccttttaaatatttactgttaatgattctggatcctatttgtattgaactgaagatcctctaaagcccctggtcttatttctccaatctctctccaggggtgttcttacatgtcgtggggtgcagaccctgccaacttccatgctgagactcaggaaagaggtttgggcttgaagcttgtatgtcccagagaaagaaaaccctaatgtggaggtgagtgtgttgatgggttagaagtccagatgcctcagccagcaccttccttcccttttcgtttttttattttttttatttttttaaccttttgtccctctgtatttctcagaaataaaatgctctttagatggatttggattgtgtctttttttacagtctactatgaggcagtcttttgttctgtagatcctggtgttctctgtttccgtgtgagaagatgaaaaggaatgaaattccccaatgcaccctcttcccctaatgtcctacaccatctcaatgtcctttggctttaattgtgatccttctaggccttggcgaagatggcactgggagtcctctctgattctggtttcttttatgaacttgcaaatagtctatcccaaggatggaacttcagtcctgtcctcaccttttcctggcaaaaatgcccataaggttagaaacaaggctattcccattctgcctgaggactgtcgtagcctcatcccagctttagcctttcttctctgttgctaaactgtgtgatttggcatagcaaggctttgtttataagaagaccttctggttatttatatagaaacttttcattttcatgacttcattttgttctgagagcatatccgaagattctgtccggtggcaggcccaatcagtggattcagcacaagggagttttccatcttccttgggaaagacggcaagcaagctcagttttagtttgggagagaattagtgtagaatctctaaagccatctctatggtaagtccatagatttccaggaataaaacacagtgaaacctattaaaaaattataatcgagcttagtgaatgagaaaaaaaaatgaagttctatccacatataagatgcaaatggaaagaaagtgagaaagtagaatgtacattcttaaaatccatgtctttcattcaaaactgttaccagttttacacattcatggtttggctggccatctgggtattttggaaagacagctttaaacttctcgtggaagttatactaaatcatcaccctggaaaaaaagcacccagaattctccagatgaattgtagctagtatttacacccttcaaataaatgaatcaggggacagtctataggctttcccacaagtgaatctaaaccaacagacatgcgtgaaatggcttgtctcagtgaattttagccagagctgcccctcccctccagaatgctgaggactatcctgtagcacaagtttgagattccaggctctctgcacccagccctttgaaaagtgcaaggaatgccgattaatgtataaaacaggctccctaggtctgctggaccagctatgtctcgaggcaggccagctccagttgtgcaagtggacaagcaggctaggtagttattttacttctgtccattagcaatacagctcagagaaaggtcatcattggtggtttatgatctttttaaccttttaaagctctttttactatccagaggtgatggataagtcacttccaaagacagctgcacacctttcatttttggccattaggcaaagacagatcccagcatagggcgttttctttgggtctgatcttaatgaacctagggtggttgtgagggaagactcatttgtgtagctgcaagtgattactatctggctaagacagattgtcctcagagctcctggaattgaaaaccaaagataattacgttaaaccttactaaaattatgctttatcatcccagcagtagactctctagaaacacccaagcagaggaagatgcctctggactgagtctttggtcagacatcatgttagtgccttaacaagcacagacaagcattgagccctccacacaccatctccccaaagatctccaattagccacacgaggtggattgtgtacaaaaagctccctttcttttgcattctttttaaaaggactcctgcccaatttatgtcacacgtcactttagttcctaattctgatgtctcccgacaccaacgccaaccctgtcctcccacatattctgatccttgtgaagcaaagattttttagaaattgtacaaccaagtcaagagtgcctgcagacgccctgtgggtgctaatgtcaccattgctgcttccatccttgtctatttcctccctttgacacaagaacagcaattcttatctaacagataaggaaaaaaaacaaagacccaccagtgtcagcatgagagcgagattcatggattgcataatgcagcagtccctgtagctttcagaatttcaagagaaagttggaagagacagaggcccagagctctgggtatttgcattttcaccaggggcattctgggaaaggatgactcacatgtgtgaagatatttattcctttgattcatgtttaaacgctgctacttcttatgctacggttacgcggattatgaatatttaatgtggcgtatactgaaaatgaaggtcaagtcctgctcactggtgacttcaatgcaggctcttgtctctgaaagggaagctacctgctgtttgcagagtaaagctgaaaggttatacgttgttaaatgtttccttaatgactttatctgctccaaaatggctggcacacaatgggggcacttgctgattttgccagtctttgctcttggcttctggtatcagcactgctgttttggggatatggacgttaggaaggagcaggaaatggcagcacaaattttgtagagcatctcatccaagggcacaattgccaaggcaacagtggggttacgattggaaaatggcctctccccagtcttttaaaatgttacttttgcatccactcacccatttattcattttgtattcatttattagtttgtaacatcttcaaatgtgataatgctgaatattttccaggcagtaaaattgcttatggttaaggaaaactatctttaagattgcgatagaaattgaccagattgttttcatagtctctgaaaataaaactggcaccattgatgtattggggatgtccagagctttagcagaactggtttagttgcccagtagtttctccctcccctgtcttcacatagcctggtctctcatcccttggcctagaaattctgtttcaaaagggaagagagggcaagtcgttggagggaactaacattcactgattatgtactgtctgtgagctacagagctaggcactttaccaaaaatagcacatgcaacctcattgaattcccctaacaacttcttaggataggtattactattcccacttacagatgaggaggctgaagctgcaggcatagcccaagctatgtagctagtaagcagtagagccaggattagattccagcatggctcattctaaagccatctctcttctaagtgtcaagaagtaaatttccagattgtgtaagtaactgatggggtttaatgagatgttgcaagaatgggaagttgcatcacctcatcctgccaatgcactggtcttgttttctcttttgttctccctttctccatttctcaccctgagaaccaagtgtgcagttgtgggtacgtaggaggctcctatcacaggccttccatgtaagacactgccctgggtcaggtgctgtctgatgtctgtttgggccttgattcagttcttcctaataatggcttgatgagaccagcttctctgttatctcagtggagtggcagcattttgcaatgagataggatcaaatgaacaaaaaacaaggagagctgattgttcctcattagcttccaccacctaggggtgtctttccaagtagaaagactctttggccttcctatccttacctaatctgtccttgtgatttggcatactgaaatagatatgagaaatgctgtttccccatgagatacattcttttatctcttttagagagttacagaattagttgatttgttatagttttgcattatgttatgcaatgtttatatgcccagagagttggtattatcaaactaatggacttcaggaaaatttggccccaaagaatggagccacataggatggaggtctttgaaatgtcataaagtatctggcttccttctccagccttgttcaaactgactaggcacaggtgtagacccactgcctctcctgtgctcagccccaagacaggcacctgggagagctgtgaggacagcacagatcccatcccattcatgacagcgcattttaaactgtaaaggactgtgtataccagctttcactatcccctttagtgtaccccatcctgcagcatgatgagatgggcagcctgtgacatggaaaaggaagctcaccagcctactctgtaaccagttcctttatgaaatacagcctttctaggtagtgttctggaaaattagctccagctgtctgccttcatgcccttttttgagaagtcacggcatgcatttaacctttgttgaagaagtcaacacaaatcactgtgtgcaaagcacctccctgtttttttttttccttttaaaatactccccccagttttctccatccctcactgacatttttattgccaggctttggtttggaaaattatgggtagggaaagttcaagggcaggatgttcagaacggcactgcacatctgtgaagggaacacaacaggagagccagcagctgttgaaagaatggaatgtcagatggtagaggagccgagcccactcagggatggtggaagagaagatgccttcagggcaaagaggctgtaaataactccaatgggaagtcttgtctcccttcagaatgtaccctttaatagcaacacttggtgctctgatatgagagtaactctaactcagccttcctagctcatctgaccttccatattgccatttgttcaggaatcgagtgaaagcctggtagagaagacaggtggagagtatgccaaggaacagagtcaacttctttatatgtccttgtctccatataggtagattttggggacaggatctgttctttggttgtcaaacagattggtttcatttacgtcaaagttcagagcattagcacccttcctccttctcccttccacattggtgaggaaatcttgtcttccttgcttatttgtcattgcacaagtggtacctaggcatcgtaggcaatggcatctagaagcattaagggaactgcttatctttggctttcattggggaaatcagggactatgctaggaaaggacaggaggactgagctgaacctttcaggtctgccacaaaagacaactgtagaatatagtattagagtcaaagaggcattggatcccaactggtgccactgttctctgagcctcagcatcctttcctgaggaatgaggatgagggacctcctcaaggtcatccgaccagccaggggcagagctggagctggaagatagaacttttctctcccagtccttttctacttgatctcctgggttctttctactaaatacagaaatgaacaaagacatgataacctactcattgaatagcaaagtatatattgtctttttatgccaattctggacttctaggcccttatcatgggggaaactttagggccatgggaaagaacaaagataatcccaggtggaaaagatcaaatccagccaggtggctgcgtgggattagtttatttcatcctcactggtgagaggccttgaattccttgattttatgaccctcctactaatctctctctctccctccccactgtctccctctcttttttgtactgtttcagcatggagttggggatgggtaagagttaagagttcagctccactgtggaagggtaacacagggctgaacgcattgaagagctgaacacattgttttggcctgtttggaatttgttatgcataacttttgaggacattttgcccaattgctcacttgtttcccctgtggaaacactatctgataactatgtctatacatccctatctactttgccttccaaaattaggatgaattatttcttcccttctcgccactctccaaaacttaaaaagaatgctttggacaacctggcactctctcagccctctcttattctttttaaaagaataattgtttcagggcaaatgaagaaatgcattccctttcagacccactagcccactagttacttctgtcctctacaacaagcctgagtttataccgcaagagggctgcatctcctccctgtcacatggcactgggcctttccctatagtcacaggctgacatgcattcagagactgctgagagatcaggataggagccagctggagcgaaatgttatagctcagaacagtttaatccaaacacaagggcagtgcttgtgcctaacacaactgtggtaggggtgtggtgtggtgtgtggagtggtggcagcttttacagctttatcatggggttcatgggctggaggagatgtgaactcttccttgtcttttaccccttgtcttttgacctgacagcctgacacatgtagctttggggagaccctggttggtgatgagtcatttgtggcttaaaaatagaactctcaaagcaacaatgcccttgggactttttgatgcatatgtctttgttcatagaatttgggagaaaagagagagagggagagaaagactctgtgtgtgtgtgtgtgtgtgtgtgtgtgtgtgtgtgtgtgtaggaaacaattatgtcctgcctaaaaattaagtggagaagaagagcatgggggaattggccaccaggctcatcacagtagcagagatgaggctgagagctgtctgtgtacctgtggccttaaaggtaccaatcagataatagctctccactgagtacaaactgtgtataaggcattttgctaggtactggggaattttgagtacttatgtataatgctagatcttttccattaagacatttaaattatacatatttttacaaggggcaggaagtccagccatatataaaggaaaaataagataacaaaacaagaacaagtaaggcatcgctaagcaatatatcaatgactaatatgagcattgcacacagtaagtgctgaaggttgaggagttgaaaagatagctggatgctataacatgttttggctgtaggggagattttgagttgaatagacagaaaactcagtctgccctcaactctaggagtccacaagagaagactctcattatggcctgtactcgggctttgtgattttcagtatacgctaaagtcaagcaaaaccttgccttgaaatcagctactgagattagggattgagaatgcttcagggacggcataaaataatcagagaagcggactctatccagtggcagtaatacctgttgtccaatgatagatgattaaaacttttggaaatttttatttggaaatttccagaagcatctgaatggcatccactccatctttttgaaactgaggtcagtgtgcgacgtgctttgcaggggtcttgttacgaacttgccacatacagagcatcacaggggcatgatggggaggagagtctgcagtaaaatgagcttgtgctgctcgcaaacaggccacagtgtgggcatggttgttggcctgaagaccagcatttgcctccagctccgtgctgtgatttccatggactctaggtacgttggctttgttgagccaattcttccataagaatattaaatattatattttgcggctgcattggtataagaatgaatataatccaggctggatttattattgttgttattattactattatttttagagacacggtctcactctgtcacccaggctgaagtgtactgacatgatcatagctcactgtaaccttgacctctttggctcaagtgatccttcagtctcagtctcctgagtagttgggattacaggaatgcaccaccatggctggcaaattttttttttttctttgagacagggtctcactctgtttcccagactggagtgcagtggtgcaatcatggctcacaacaacctctgcctccagggctcaagtaatcttcctgccttagctttccgagtagctgggactacagctgggcaccatcatgcccagctaattaaaaaaaattattgtagagatgggggggtctcactgtgttgcccagactggttttaagctcctgtgctctagcagtcctcccacctcagcttcccaaagtgttggcattgcaggcgtgagccactgtgcccagcctggattcgttgttattattcgtcatttattattatatttattttcttctgattttaaagaagttaaaatttagacttttttgtgtcccataagtacagtggcctcaggcactgtgcctgcactgcctgctggagaaattgactttatttctccctttccaacagccccatccttctggaaattttcacagataagaaaacatgctcagagacagatgccttatactaaaccccttcaatgtggtctaattgtttcaaatgagaaaattaaaataagcattttattttaagccctgtctgataacttggctttgggaaataggaacttcagcaacccagcattcaaaacaatggatacaacaaaaattttaagacaacttaatagtcttgcttttctcccgagttttggaaaaacatgtgccttttccattcttttatctgacaatgagtcttactggtttaagagatctgttcgctgagagtgcaacagtacaaaataacatttttttcatctgatgtttgcaaattcatctggacagggaagggcagacattggaaatgagtgaggcggatctggtgaggactgcaatgagagctgaagcctcacctgaagtggcttcccaggtccagctgattgttcctatgcagaaatgcaggctctagtggccagatcttcctgtgtttcaaagaggagacagaatactgcattttatgttgaatctccaattttaaaatattggcctcaaatccaaaactcttaaagtacttgcaggccaagcaaaacacctctgcaggccagatttgggcctcctgttttcagcctctattctaaactgtctctctttctggtcttgaattggctgtgctccctgagtgccaggaaacgttcttaacccttgctcctccatctgccaaaaaggaccccttctctctctaagatgggaagcctttggtctcagggtgccccgggtcgtttgccatctaacacattttcaaacactgcttaaatttccatttttctcgaggcaaatactgtatgccacaccaataaatcatctacagcttactgtaagccccagagctacatatcactaactctacatcatctctgaaaataacgttgttagaagctcataaacatacactctgtttgtttaagaactgcaagagcttttaaaacatggttgctaagtcacagggcatattttccaggacataaatggaagtgaacatatgccccttaaattgtcagattctttttttataagaagagaggcccaaatctgtctgttctgccaggatattaacttgaccaaagaagagttgattatactaagtgtgtaagtgttagtaattattggaaactatcctctgacttacttagctaaatgggcacattgtatgaaacttgatttagtttctagcatatgtaggtataaggtacaggttgacatggataaatcctggctttagttttcatgaaccctaaagttcacaatttgctgaactttgtatttaatatttactgatgaaattcttacggtgtcgtcccttccaaaacaaaatcggaggcatacttagacttttcccctgagacatggtcccaagtctaggctacaacttcatcactgaccctttttcatggaaatttggcagttagtgataggtagcgtctgagcttatagctcagatattttcaaagtaggaagtagatggccctattaatatcaactgccatttcagtagagctgcctcatcagtctcttttccccgtggaagacactcacaccaccttttacctatcaggacactctcaggaagaaatagtaggtagggctccaggacctctgatggtggaatctactagaatgcagttgtccttaacaaggatacctatctcatgttgctcatcacacccatgcagagacctgccaccttgtaatttgagagctggaatttccatacacccgctaccctcactccatgccagaaaatgcagaaaatgaacccatggcccagtttgagatacaattgatcttgaggccccagagagaactgcagggacagtgtgcagagaaggtgaaaataacgtggatgctattagatgactgtacctagcatgtgcttttcctctagcagtgggaggaagtggcacaggagtgcattaaggagtttgccctcttcataatagcatgagtagaaataataaggcaaggcctttaaagaacagcattaataattgaaaggtgctccaggcagccatgtggtcttccagtgcctttgagtacaatctgttatcaggtacgaggtgaggctgaggagtagacaaggagggtgcatttggcggctgtgtctgtgtgcatgcatgtgcttatgcttggaggaagtatgaataagatttggcagctacagcaagtaaaattatagaaggcaatgtatgtatattaccatgtagactggtggtggttcttttgtgggtcaaacacccatttgggaattggatgaaagctgcaaaaattttgcctgccaggtaccctatagttggtcaatgaaacccaaactaaggatttctattctcttaagatggattcatctgctcattcactcctgtttcttctgccatgaagatcaggtgactgccagagggccatcttcaaacccgaaggttaagcagaggttgactgggaacttttccctgcatgacatacaaaacatgtctaagtgaaagtctctgctgtgttttcccttcttgatcaagtgtcccttaacctgcaatgcattcaaaatctcaacaatgacaggtgatgctaaggaaactctgggagggaggccctgggcttcctacctcttcctccaataacagacaacactaaaaggggtaggtaagacaagatgcatctattaggccaagcctaagagctctttgatttgcttctcttgtgtattgtgggttagcacttgtttgtagaggacaaattcctctttaggcaatgattccaggatgcaaacaatctccagccaaaatcattccacccgagacccactgctgttgcaccaggaactagggaccactgggtacccaaacagatgcaaaagctgccacttctgtacaaggccgtatttctcaccctccattggagaggaagaggtgagtgtagagagtcgccagggatctctatgggctcatccaatcagtcttcagaccagtttgacagaaaacagaagaggagcttcagcacaaggaggcctcatctcatctgaattcccagcttccttcagatttcttcctgacctcacctgcctccaagccagccgactgtgacagtttaattggtgcagggaaggcgaggcagtggggaggcaggcaggggtgcctggcattctggaaggagactctcctgagatgagtgaggggaaccgcaacagacaggcctgagagcgctgccttcgggtagaaggtcacagagctttgcttgaaaagaatgctggctgaagaggaaacattgccaactccctcctctttgagcccactgggccagaattgtatattcatatttgtcatctgtgccctttccactctggggcaaaaaggtctgctgggcagctctggcggggaatgaaaatgggtgggaatgtagctgggcagggtggctcacatgaggtaagaggatcacttgagcccaggagttcaagaccagcctgggcaatgtagtgaggccctggaaaatgttttaaagattagctggtcatggtggtatgtgcctatagtctcagctactcaagagcctgaggtgggagcatggcttcagcacaggagtttgaggcagaagtgagccctggttgcaccactgtgttccagcctgagggacagagtgagaccctgtctttaaaaaaacaattttgcaaaaagaaagtggggaggaaggagcctagtggtgaacaccagggtttggaatcagaccagaccttcttggcttacttggctctactactttgtagctgtcctgggcaagccagttaacctttccaagctatgaagtctttcctttgtcacatggggtgaaagtggtgatgagagatgtcatagtggataatacctacctgatagtagtgtgtggaaacaattagacactgcatggaaaggctcttagtacagtgcccagcttgaacatgaccaaaaaaagtattagatattattggtattgttctttttgaggtctgttttgaaacttttaatcaggtcttgagagagatgagatataaacacagtgaagttaagaaacaaaataagatgtattgtaaggcagtaaagagatcggttatcagaataatggacgagacctgtgcttctgaaaactgcaatctcaactcattcatggtttgtgaaaggaaaaacaagcatttaaaaaagatgacacagctgggcatggtggcttttacctataatcccagctactcaggaggctgagtcaagagtatggcttgaggccaagagtttgagatcagcctgggaaacagagtgggaccttgtctctaaaagtacatacataaataaataaaacatgagattgatcagcccaagatggaaatatagctagagaagttcaatttgattttatgaaacttttgtttccattacatatatagatctatgtactgtataaatgtatatatactgtataaacgtatgtatactgtataaatgtactgatttgtgacgtaaactctgtttcttactgtggaatttgctaaaaagcgtttaagaaacactagcttttagtgtagaagccagcatacttgctggttgcagtaatccagggaactttaaggaaggatggcaggctagagttgggtcccaaggcatgggtagaatttggatgctgcagaagaggggcatggggtgagcagtccccaagaccatcctccctctgacatcaactgcaggtttggcacgttccccaagtcaccttcaggttcgataatgcataggactgcagagctcactgaaggctattatactcacggttacaatttattacagggaaaagatacagattaaaatcaaccaaaggacaaagtacataggccagagtctgggaaagatccaaatatggtgctttcattatctcctccatgtggagtcatggatcgtgttacctcccagcatcaatgtgtgactacacgcaaggagtactgtcaatcgagaaagttcgcccgggcctcggagttcaaagtttttactgggactggatcatgtaaacttgaatgactgccctcatggccagcctcagtcccctgctcccctggaggtggatggataccatgtaacccaaagcctccatcataaatgacattgttagactttctggcatggtcagcccctacccaaaataacactgttactatctggccagcccaagacccctggaaaagacacttttatcaggcatgacactccaagggcttagacattgcctcccagaagctcaggacaaggccaggcctctctttgggcaaagttaatgtctttacaaaaatagtcagtgaagggactttgttggctggaggagaggcctctcttgaggaaggctggaagtgggtcctttgatcacttgcatgaatagcagaggagaggaaaatgctactccatgaagtggatgcttccagattctactaatgtcaacaaaatccctgttgaaaacgaagcgatttattccttcccttggctcctctgcatacccgggctgaataacctgttagccagtaaggggaaaatgaggcacaggaaagaggaaaggggtcagcctggatgtatgcttgccatgtgggtgagtgaccttgggcataatggacctttggttagatctcatttgctgccacctccgggtgaccaggacttttcctgtgccttgtttctttgcagacctgatgaatggtcctctgtgtgcccgtgacaactttagtaaggagaatatctgtctccctgctccaatttaacttcctttctgtaaaacttgatgaggtcaaagccagaaagcactgaaacttcaagctggggatcaaaagcatgtcatccagccatgctgcccccttgcaacctggcaaatgagacaacctccagccagggacagtttataattgtgcaatcaaattaacttggatttcagcctaatgaagtccttaatgccctgaatgaggccaagccctaatatttagagaagcagactggaccccaggaaagaaaagaacaggcttcagttaatgcctgctagtattaattatgcttcttccaaaattcatcttctcgtaggaggcaacctgatagcacccagttctgctaaggggttttcctgctgtggctcataaggagaacagtggaaagaacattttattggaaatctctgctgaactctgcgttctgggccacatttcttaacttcacaggatcttagctttctcagttgaacaggaagaaaattcctcctctcttagaagtgttttattgtagttaaaaatcaatactctgaaggcaggtaggcttggttgcaaatcccaactctgtcatttgttagctatgtgaacttgagtgagaaattaacctctctgaggcttagttcccttaactgtaagtatggttaatgatattcttggttgttagtatggagaatagtgaatgagatactgtgcatcaagcacttaatacagcacataggacatgctggcatttattaaatctaatgatgatgatggcataaatgtaaaataattttcagtatggattacatgtcactaatttggtatcagtagtctttattttcattaagccaatgatttagctcttgtttagaaaattgctgctgattccgtaattaactcaataaatatttattgaatggctattatgtgcctgacactattttaagccctaagcacttacattccagtatcagaaagagacagaccgtaaacaagttgacaagtaaataagataaattcagttgatgccatgtgctgggaagaaaataaaactggtaatggaaaaagcagggtttcttaaatgttttgtgctgaggacttctttggcagtctggtgaagactatgacccctttctcagaaaaatattatttataaaggcataatataaaaacattggattataagaaaatagattatgttaaaatcagttatcagattataaaaaacaaattatgataaagtctgcttgcttcttgattagggcatttttatgaagatccagcaataattctaatataccaccatcattttaaagtaggattaatataagtaatactttgagatacctgtaacaattgtaatcttatatgtaaatatctgagatttctgttgctaaaaaaagttacaagtgtcattaatactgttctaatttattgtagaacacctgattctgtcactgttcggggtgccacttgtaacctgccatgatccctggtggactgaacaaagtggggctaactggggaataaaagtcaaagacaagagagtatatttggaagaaggggttgggggcacctcgcctctagtggacaagggccctgagctgtttcggtcctccgaatttattaggtaaaagagataacgagaaaggggcaggtggttgtcggccagcagtttgaatcacagcaggcttgcaagactgcattcttcaaacaataggcactagatttcccagtagataactttaaggagcccagcaaacctcctggcccttagcaaacctcctggaggcatgcgcagtcctgagtttgctcacattctgcattcacgataaacagtttgctgtttgatcatatagcctccagtggaatgctgagttggtcatgtcccatgggcctttggctccctacagtttattgctatattcataattaaaggaaatgccaaatttgaattagaggttaataaaaataaagatgtaatttttttggtccaaatcatggactccctgagtactgcacaaggacctcttggaagtatatggccccaagtgaagaatccttgggatagagaatgacttgtattgggcattaggctattactttagaaagagtaataatgcaatttccacttttaaacagtcattctggacatatagatcagtggaatagaattgagagtccagaaatacatccagtttttatagtcaactaatttttgagaataataccaagaccatttaatgaggaaagaatagtttttccaattaatgatgctgtccagtgtgggcaacatagtgagactctgtctctacaaatttcttttttaaacattagccaggtatggtggcacacgcttgtgaacccagctacttgagaggctgagatgagaggatcacttgagcctgagaggtggaggctgcagtgagttgtgattgtgccactgcactccagtctgggtgacagagtgagaccctgtctcaaaaaaaaaaaaaaaaaatggtgctgggataactagataggcacatgcaaaataataaaattggactcttcacatcaattaactcaaaatagatcaaagatctacatgtgagagcaaaaacatttaaacttttaggagagaagacggggtagacctttgtgacattggatttagccatgaattcttaaatatgataccaaacacaaaagcaacaaaagaaaaagtagataaattggacctcatcaaaattaaaaacatttgtgtttcaatggaaggacattacaaagaaagtgaaatgacagcccagtttaaaaatggtcagtttatgaatacatctctctctaaagaagatatacaaatagtcaagaagcacatgaaaagatgttcaacaccttagtcatcagagaaatgcaaatcaaaaccatggtgagataccactttacacccatttggatggctatacttgaaaagacagatcataacaagtgttgacaaggatatggataaattgcaacccttgtggctgctcgtggggatgatgtagaatggtgctgtagctttggaaaacagcctggcaattcctgaaaaactgaaagacagagctaccatgacatgtacattccactcctaggtatttacccaacagaaatgaaaatacatgtccacacaaaacttgcgcttgaacattcataacagcgaaacaatctaaatgcccatcaacagatgactggattaacaaaatgtgatgtgcttatgcagtggaataccatttggctataaaaaggaatggagaactgaaacatgccacaacatatgtgtaccttgaaagcattatgctaagtggaagaaactagtcacaaaagatcacacagtatatgacttcacttgtgtaaaatgtcaagaataggcaaatatatagagtcagagaatagattactgactccttgcttgtggggagattgggggttgatagctgaaggctacagggcttctttttgaggtgatgaaagtgttttaaaattgattgtcccattgaattttaaacctcaaatgggtgaattgtatggtgtagaaactagaactcaataaagccattagcaaataatgactgtgatgtggagaatagagttcagggaaagacaaaagcaaggaaaatatttgggaggcagttttcttaggtctcaactgagaggatgctgccttgggagaggtccgaggccattggggtgtgagcacatgctggaggcgtcacagacagagcagctgtttagttgaaaatggagaggaatcaagagtgactcttaggttgttgaccataacaggtattttcctcctagaaaagctgagcttcagttacaatctgcagaaatgctgggaggattagtggcaaacctaaaaaaaagaaaaacactagaagcttatcggagagttggtttgcaaagtttcactatcaatttcattgtaccttttagcagggaaaaatattcatcatacatgcacacaaatttacacacaacttcacatcttgaaaagcaacaatataaaactcacacgctttagaaagccaagccagggaagaaagaatgaaccccctgccttgtgacttctcatgctgatactcaatttgttcagtggaaacggatcagtgagtagagcaagtaggaaagaatctcttcaagaacttatgtatcttcgacatgtccatcacacataattttctcctagtcacatgtacaaatgataaaggagaggaaaatgtcatttcagggccttgagtatcacaggattttgataatgttagcaaaataatgggtaaaataactgatttctcaattaaagcccaagctaagtaacttgtcagcccaggtgtgttaaaatctgagttactctaggtccttctctagagacagtgtggcttcggtaatgagcaagctctggaaattaaagaagtaatcagatgttgattgaggttatctgcttcacttcaagcagaagcaaatcaagtggacttcccttgaagacagaaatttctctattgatagagctaagggtgtttcatgatgctgaattctttgtggctccttttcacataaaagtaggaagccattttccctggagtggaagggaggatgacttcccaggaatatgagctttgagccaaagaggcaggaactgggaggctctcagttacacttgagaaagaattatttctctcaatattgttcttcttttcctccagagccccagtgtgagcctgggtgcaagctctgataaattaattgacagagggttgacttctaaccccaacttcaccggcaaactttagctatgtaattccgcactggacagactgacagctcattttcctcatccacaaagaatgcagtgcaatagagaacttgtgaaatatcttctaactttaccactcttttgttttcttaatcctggcaaaattcacagagcataaaagtaactattagccattttaatgtgtacgatacagtggtgattcgtaccttcacaatgttatgcaaccatcacttctatttagtcaagacatttctgtaaacccaaaaggaaaccccatactcatcagagtcactccccattcctctgtcctcctaggccctgacaaccactgatctgctttctgtctctatggatttacctcttctagatgtttcatctaaatggaatcatatatttgcgacctttgtgtctggcttccttcattgacataatgctttcaaggttcatccacgttgtagcacgtatcagtacttaattccctttgatggctgaataatattccattttatgtctgccacacattttgtttatccattcatttgtcaatgaacatgtagattgtttctaccttttggctattgtgaataatgctccaataaacagttgtgcacaagtatctgtttgaattcctgttttcaattcttatatgcataggagtggaattgcagggtcatttaggaattcaatgtttagctttttgatgaatcactaaactattttccacaatggctgtaccattttacatttccaccaacaacatgcgggggttgcaatttgtccacatcctcgccaacttattttgtttttgtttgtttgctttgtgtgtgtgtacatatatatatatatatagccactactcccttggttcgtctcagggagtatgctccacctacagcggcagcttcagggatggccagcagcacaatgtgggaagagcacaggctttggactcagaccgaggtggggttcaaatccagatctccctcttcccaggaaggtagccttgggcaggtgataatctctgcaaatcttggtttctccatccatacaacagcaataatatactggggtgaagagatgagtgaagctcctggcacatgcctggcagacagtaggctgaacaaatgctcttcctcctcaattatggatagaaacagagaggaagagatggattttaaacaatctgcttttaaattattgttactactatttttggtattggacctcattatagaaagttttttttttttttttttttgccatgggcttctctgcaaaatcatgcctgattaaattaatacccaaattgcaatatgtttattctttagcccagtttatggggttaagggagatggatctgcatggtaaattgggaagatttactgagctaaccattgaactagagattcccaggtggatgacccacctttgcttttccatcgtgtccatatttcagggtggacttgaagtagtcattgttcctcaagttccttcaagaacatggacttcttattcatcctagaaaacaaaaacctcttggccacaaactgctttgttagttttgtatacactgtgttacttgtgatggaagcacacattccctatgtaaaacttcagccacatctttcaaataacactaacaagttccagtgatgtcgtattcatgctgaattattcttttcttggtcccaagcaaagtaggttttcacgtagtgagtgctgaggatacctccccttagggttggcgcccatggtagtgagggctttggaccaatgccacatgactacaggtggctcaagctggaatttctgttcactgaatgtggtgaataatgagggagggaaagagcaaagcagtagccgggagagtgtttacactcagtgccccagttagctcagagcatggtaggccaagaagacacttgggcaggctcataattttatgtgccttcaaattgatatttgttatgtaagtattcaatatttatttagcagagaaactaacctttgtgttggggaagcggaggaggaagaaaactgttgtagaggtggctcagggaccctggcaagcctctttagcagttcagagactctttgtttatctctgatcttgtccttatgggagctttacctcctcacacctggctttttatagtgctcttctcgatcatgtatagtgagtgctcaccctgaaaatctcatttttccatcttgttacttttccagtgatctcctggggactttatagattggctaccaggaaaccgagtggttggcttaccccctaattcatctctggctgagagttttctaaaagatattttaaattaggccgggtgtggtggctcacgcctgtaatcccagcactttgggaggccgaggcaagtggatcacctgaggtcaggagttcgaaaccagcctggccaacatggtgaaaccccgtctctacgaaaaatataaaaattagccaggcgtggtggcacgtgcctgtaatcccagctactcaggaggctgaagcaggagaatcacttgaaccctggaggtggaggttccagtgagccaagattgcgccactgcactccagtctgggcgacaagaacaaaactccgtctcaaaaaaaaaaaaaaaaattaaattaaatgcttgctttttggcaggcgctgtggcccttgtaagtatcacctcatttaatcctcataacatcttacagggtaggtagcagtattacccccttcttacagatgagaagaccaaggcacagagaggctaaagtatcttgcttaaagtgacagctgggaagtggcagaagtactcccaaatggctaatagaaattagccattttatgtgaacaattcagttcaaatggagcattttatcccagaactttaccgttaatgcctgcatttggcttgggcaaaatagcataacacttctttccaaaatagtcaggatttcagacccctgataatgacagagaaatgaaagcagtttgaggacagttttatcttaaagcatcatatgtgctaaacctggtgatttatttctgagttaagattggtataataatgaagtactaatgaagtactaatatccataatataaatatttctgggaactggtgggagctacccatctacaaaggtggttctgttttatttggttcccagggagtatagcattgatgtcataatttgcatctggcagtaccttctgagtcactggttaatgccaaaacatgagaatgatggagccctgaaattcattagcttcttctggggcttggtgaacctcaaaaccagaacctgggtttaatcagacattcagtaaggaaagtgatcaattgcttttcctatctgtaactaattgtatttttaaaaaagcagggaacttaatggggaaaaattttccctcttctgcttttctccatgagcctcaaattgctagatattctgtttccagggtgttgatgtcagtggaaatggcatgcacagaatcattatctactatgccacaagctccatgctatggtctggcaaagaaaagactgccccaggcaaaggggaagtcagcttatataaaaaagcaataagcttttccttaattgctccctaagaaggaggattctggcatttaagatgagctaaaagtacaaaaagaacatgttttgtaatgaaggaggcacacctccctcaaagacccctacaactactcttctggtttttggctattagtaaaatagagactgaacaatctcccattgtgcactcaggagtatgtggctgtcccggtagccccctcctcttttacctgaagcccctcagagcagttatgattgattccacttctcttctgaaagcatcaagtcctgggctgggcaaaggaaagatgaatgactcccatggctctgttgtagattacttagtgccagttgtcagttcttttctccctgggaagggtttgaaatgagattgttttcgacaggctatccatgataaatgattttccgagtaagaaattgctttcactgctgaacttcaccaaatcactctgacaaatgtttgtggctgcagggggccttctcgtggctgtctcatgcttgaggggtgggaggctgggatctcaaaccaggatggctcaaataggacgtctcccagtgaagacagaaagagacaggaatgtcgtctcgttaatgtgcatttggtcagctcctttcaactgctgctaaaaatcaacaagtgaggcccaaaatattccagatccaagaaaaataggtaggctaaagggatgtatacatctcttagttctgattattacattgttttcatgttggttataaatagaacagcaatatgtacctacagcaagggcaagaaccctcccagcaatgttgcaatgtttgcaacctgttattagtccatgacccttcctgaaaaatcataaaagcagcatgccctcttttaatattatttggcatttcaaaagagattaaataccatgtctaaaatcacaaaggactgttagaatttgccttttccagctgcataaagtcccccttcctcccctagattctgggagaatagggccttctgcaatcacagacacatgtcacttggcaacaggggcccccagggcattgacgggaagatgcctcctaagcttggatctgcggcctttgtgggtagcatcattggattgtttactcagag[450 bp omitted]ggggagtcccctggggcaggtggagaaagatgagtcatgtttcacctctccacctgttcttgctgaaatgataccccatctttctagtagttcctgcctttgtttagacacacagatggccagactgaagcccaagaggaaatggatgtgctcaagacaacccagttggtgagcttcaatgccagtcttttttgctgtaatgcccagtctcccctggccattctcacattgctcagtttctctctggccagtgtgcctgcccgttgacattctgccctctttcagaacattgcaggggaggagtctgtaaggtaaccatcaccaagtcaagctgtatatagtccagcattgccaactggattcgctttattcattcactcataaaacattttgagccttttctgcaccatgctctgtgctgggtgctgggaccatagaagtaaacagaaaaagtttcccaccttcaaggggctcctggtctcacatggtatctgacaagtgggagcagcggcgccaacaacagcatgggaagtatgttgagtgcttactattctagtccacgttctaagcattttctttatattagctcttctgagccttacccaagtctgtgagatgggtgctgtcatcatcgacatttgatggatgaggacattagggtgcagattaactaagtagctcccacagagtcacatagggaatgggtgacacctccaagatctgaatcccagaaactctggctttggggatagatgctctgagttggcactgcaatgggagtgagtcaagggcagggatggtcagcacttcagcagggtaaggaagagctgccggaaggagctggtgcctgagtggggtcctgagtgttcccaaggtgtcctggttttcagttttggtgagaagcagcctggctttcctgagctctgggctgggtctttgggagctgggattgtcctgcagcccctttcttgtagtgtaaagactgtcatagaaaaggcaagttcatcagggtcctgcctttgcatccagggggcttgagagctatactgaaaagaggagaagatgtgaaatccacgtgctcagctccatcctcaaaactccacttctaaagtcactcatttgggactgaaagttttttagaaactgttcagaaggaatgtggctcctctcccagtctggggctatgggccatgggcctaggtcacaccttgctgatcaggacagaaactggaataaatgactctctattttgggagcagacacatgtaaggctaattaggtctgctgaaccccaggtgtatcagggtctgtggaactgtaccatcccagatagggagcaaatatggcaaagtgagaaggcagaagcagcagttgagaatggctgactcatgggcagcacctcttccctggcctgacttcagcagggggcagatggcagaggcgtggcagagcaagcaatctgagccctcctgtagctgctgggtccatgctggaagaggctcctctgttctggaacttctctcgtggcagttggatattttaagtcatgaaggcttccatatacttagcagatctctgactcattgggctgtttgattccttgcgtgaaccagtaccaccaagacttcacttttgtcttcacttcgtccatgacctctaccagatccaagcacaccctccttgaaactgtgctatctgcaaccgtgcggtgtaaagaagtcatctgtggttagaggacagtgccccacaattgaggaaggaaaaaaggcatgccaatcagagagggcaaaacactcacatttgagaaaatgaacttgtgttctagtaagctccatcgctctgaccctcccggcttctgagttttctgtcaccatgtctgtctgtatgtccaatcaagactgtatcccatcttggatgtcatgggattctcattttttattcattctagatacactctgattattctgcactttcttttcaacttgtttgggggacaaacagcttttatagctggggagtgaggttgataataaagactttaaagacaaaaatacagatgtgcaggttaactgagcaggaccaagatgagcaggtggctgggttaatgtcatctgaaaagccaatacactgtgtgtcacaacatggtctgagcaaaaactacaaccactatgaatggcttccaaattaaaattctttttttttttttctgagatggaaacttgctctgtcacccagagctggagtgcaatggcatgatctcagcgcactgcaacccctgcctcccgggttcaagcaattctcctgcctcagcctcccgagtagctgggactacaggtgcctgccaccatgcccggttaagtttttgtatttttagtagagacggggtttcaccatgttggccaggctggtctcgaactcctgaccttgtgatctgcctgcctcagcctcccaaagtgctgagattacatgtgtgagctaccacgcccagccccaaattaaaattctttatagccaaagagaaatgatataatgatttcaatgcagttaaactctgcagtagcatgccccacaatacaatcataatataaaatcagatatgtagagaatggcaatcagcttcaatcctctgcctgtctcagataataaagctaaagttcttttttctgggagtgaggcaaccttgccatgagaaatagaaatgcaaaggtggggtcctcttggcctgcgttctgttggcctgttctctggaatcaggaatctagcccatacaacaggagcagattaatcgacttcaggatgtttttgaagtcattgatgctgttctggaagtcccaacagccaaaggatctagaagcctctaattgatatttaccccagagcagcgaactgacccaggtagaacctgaaaatattgggatcttgcagaaggactgcagacatctggctatgcgggcttcctgaggtcatttcagtgcccttactgtggtgcaacttcacattgtacatgattgaaatgtttaggctttgcttatcacattatgttgggagtagtaggtagagacagtaggagaatagagggttagaggcttattttaaatcagattgggcatgtcactataagatctataaaaaggtttataatctaatatgatgctcataaagagtgctcttccaatctgattcttatggatttcccaggggtgatcccaatctgattgtctttgtagtacagtgaccttcatctttagcaaagccagaaatgcagttcccaaagatgggagagcagcgtctctactcctgagcctagatctgcctttttttctctctcttgtagggaggattttcattttgccctttctatgtacaaatgctttgtgctttctcgtattattttgtatagtcacccaataatcctgtactgaaggagttatgatcaccattttacagatgatgaaataggctcagagaatttgacatttgtctaaattcatgcagctcgtaagtgacagagctgggatttgaacctgcatctgtctggctcctaagcctgggctgtctcactctgcatcataaatattccttgtgatgcagtgtttaggtgggtacagtctagtcctttaatgcttaatgctgttttagggggttggggagaacatagactttcttgagaatttgatgaaaattggacctcttgggtgggcagggagccaggaagtaccctaccctcacaattttttgtttgtttttaatttttaatttttgcgggtatatagcaagtgtatatatctgtggcatacatgacctgttttgatacaggcacttattatgtaataatcacatcatggagaatggggtatccatcccctagagcacttatcgtttgtgttgcaaacaatccaattacactcttgcagttaattttaaaaggtacaattaagttactattgactatagtcaccctcttgtgctatcaaatagtaggtcttattcattctttctgattttttttgcacccacccccacaattttgcatataatttcagctagctcatggggtccctgaagcgcatctatggattatttaggcctagggcagtccttggatcccaggttaagctaattagggtcttgggaagattcgttaaatttttttagagaaaaagcttgagtgattagaaggtcatttccagaaatttccttttggctcttcaggaataaagagactgggtgaggagagaggaggatggtgaggggaagaggaactggatggaagacatgaagaaattagcaagcagtaaaagcaatttgcatttgtgaataattaaggttgttaagaccctacggacttggctaacgcaccattcactagcagtttcttttcaggttaaaattaattggagtgttggtttatttatcttttcccttggtgaatcaaatgactcatcctgatttataaaccttccacctatccactctctattaagacctgtgggggctagcgattgataattttattgagttccccagggacattatttgtagaacccagttgctaatggttaggtcagtgaccgctagagacatctcagaaccccagaagctctggtttctatgaaaagagaaaacagccccaacagttggatgtcacttatatcttgaggcagactttttttagcagaaactggaatatatggctaagggggtaaaaaggaccagatccaagagcttggggatttttagatttcaaaactagatagtttcaaactccccaggaaaggaagagagggctactaaaacaatctcctccccttttgtctagaaaagaccccttgaaaccactattagaatggcccctttgtatgcacaaaaacgacccagattttcttcttatcacttatctgctctcctagaagttttaaaatctcctgacatttaaaaaataaatgacaaggaaatgtttttcccagcctagctctgagaaaggcagtacatccatcccagaccctgctgccagccgttggagccactgcagaggaaatctgaccccatgaacatctaagcaggccgcagagcacatggctgcccctgtggctctagattctgaccacatggagtagactcaaactccagccttaaccagtggtgtgactttgagcaaatcagcctagcagtaaaagcacagctttggtgtcaagctgcccaagttcaagttctgcctaattactcaccagctaagtgatcttatttcacctcttccctgtgcctcagtttcttcatttgtaatatgaagacaacataaatagtaacacaaaaagggtgttatgaggattaattgagtcaacagataaaaacactcagaacagtgcctggtatgtgtagtgggctagaagggcacccttcatgaattttagttattattattatttaagctctctaagtttcaaggtctccacttgtggaatggagctgataatggggattttatgaggataatgagaagatacacttaagttcttagaaaacaatgccactgggcagagcatgactgctcagccagtgttcggcaatcatgagttaccatgttagtgatgagaaacaaaccagtagtcttcttacagttcctatatggattaagacttgaggttgctaaattagccaggtgtggtggtgggtgcctgtagtcccagctacttgggaggctgaggcaagagaattgcttgaacccgggaggcagagcttgcagtgagccaagatcgcgccactgcactccagcctgggcgacagagcaaaactccatctcaaaaacaaaacaaaacaaaacgaacaacaacaacaaaggacatttgaggtttctgagaaatcatatggtgggtggagactttaaaacactgatctttctttactttctgtaccctcataatctttggcactaactgcagctgctgggtttagggctcagggaaaagccaccacccctcttagaacccaagaccccaggctggtatggatatggaatgtacacgtctctcttcttccccactccgctagtttaagcagagtgagcctgagtgcctgagtcctatgtctattaactttttgttgtcagctccactggtaatagtgcttcaaagaaatgaacgtcttaggatccttcttagaagcatgtcgtcacgattgtattaagctgatggaaagcagaacaataacaacaacaacaaaaacaacattcctttctaagccctgtggtctaaagggtaaagtgaatttattaagcatgtctgtgaagcaaaagctctggaggcatggctgctgtgctgattctctgggaaagtggtgatatggagtcatatttgtcactagacgaaatgaaccaggagggcacttcaagaacagaggatctgaaagaatttgggctagctctaaaaaatttattaaataataaaaaaaataaggccaggcgcagtagcttatgcctgtaatcccagcactttgggaggccgaggcgggcagatcacttgaggccaacagtttgagatcagcctggccaacatgatgaaatcccatctctacccaaaaaacaaaaattagccggatatggtggcgtgcacctgtgatcccagctacttgtgaggctgaggcaggagaatcacttgaacccaggaagcggaggttgcagtgagccgagattgcaccactgcactccagcctggtcgatggagtgagactctgtctcaataaataaataaatcagtaaataaataaatccaacagtctcatatattttgaaatgagaccacattaaagaaaggatgctcttgggatcatggatatttgcgggctctacatgggattgggtgagtcgtgtggtggtgacccttagctcagaggagacttctactggggtgcaagtgaaaatgcctgcaggagccaggctggatgcaaggcttaagaagtagtggggaccaggagacacgtcttcaggagcatctacccagctccagtgagttattccccagtgggaatatggagcatgtcttgcagatcttttattcattcaagtaattctgcaaatccattttaagaaatgtaacacttgatttttaaaacctgtatggttttaaatggtttaaatggtttaaatggtttaaatggcctgtatgggtggccattttgtaacctttggctatggaagaccagggagctagtgacgttgtaatttgcaaggaggccatgggagtcatttggaaatggagtgctggactccttcaacttctccctccctctcaactgtcaagagagaagggttcagggcttttggttacccaggggagatacttatctcctctgaacttccccacccacgcaaataatctccttcaatagtggtcctagaattccatccctgagaaggatcttctcaaccctcccattatgttgagatatatatttaaagtattatggaaatggctattataaatggcatagatagtttatatttttaagcctttgtaaagcattttggtctcatgacattcctgcacatcaagaatccctggtggttatcgaacttttatgtgcaggtaggctccccttgagaagaataacaagtaaattcaaaagagaggctgagaatcaactattctcagcacaaataaatttttctgattacaaaagtttccatcacaatgcttttgttgaatttatgatagggtttagttcataaatcaatttgatctacacataattttcaagaaagcatctgcagcataaattgaggtgcaactgcacttcataccactttttttctccttttgtttctcattttccactttgttctgtctgtgtcatctgtaagtatctccatgttttcattcggcagctcctggagacttcatggcaaaccaacatattgaatgcaggaaattccagggtggccaagaatattctccagaaatgtactgtaattcctattcctttaatacataccagttgatgttgggagaagttggccatgtgagaagtaaggcctgagatgatgggattgatgggcatctacatctctaaagctgacagaggaaacatttggcttagaaaaaaatttagtttttttttgtttgtttgtttagtttctttttttttttttgagacagagtcacccaggttggagtgcagtggcatgatctcagctcactgcaatctccaccttctaggttcaagcgattctcctgcctcagcctcccgagtaggtgggaccacaggcacctgccaccatgcctagctaatttttgtatttttagtagagatgggatttcatcatgttggccaagctggtctcaatctcctgacctcaggtgatccgcccgcctcagcctcccaaagtgctgggattaaaagcgtgagcgattaagattgcacctggccaaaaattcagtttttgctcacaaggtttctgcatctgaactgttcattcataacacagggacagagcagagacctggagacatggcttaggatcctggctgtgccacttaagaactatgggacctttctgtagcccacacccttatctataaaatgaggaatataatgtttatcttgaagggtagttgttgaagattaaatgaatgatgtgcacagagtcaaaaccatatataaagccaatatccagcttataatactcatttgataaaattttttcttatgaatgaatgagttcatggttaataaattatctttaaagaagtaattcaaatttagaagccttcagaagctggtacctagatctgacaacagctacgtgtactgtattttactaattctaagatacaattttttcatagtttaaaatctccaaaatcaggaagtgtctcatcattcatgacttcttatggctataattggtaaatattttctttcttggtggcatataaagcagtggcttacttttttgttggtggcaacttagattccatagactaactcagctaggttaactaatttgagctgctgctgtttgccttctcttcctcccgcttctctcacccttccttcccacttctcctcttccccccttcttcttcatagttttattgaaatatgttttatataccatagaattcactcatttaaagtggtttctagtatagtcacagatttgtgcaactatcgctgcaatctaattccagaaaattttcaacacccccgaaagaaaccctatatcaattggcaatcattccacattctcccagtcccccagtcttctcagccctaggcaactactcatctactttctgtctctatagagttgcctgttctagacatttcatataaattgaattttgtaatatgtggctttttgtgacttccttctttcaattagcatgatgttttcaagatagaaatagaggctaagaagtctaagatcaaggcaacagcatggtcaatttctggtgagggctctcttccagggttgcagatggccaccttcttgctgtgtcctcacacggcagagagagagagagagagagagaggagagaggagagaggagagagagagagacaggtgggggggaggggcaagctcactgctcactggtatctgttcttacaaggacattaatcccatcataaggccccactcttatgatgacctcattagacctaattatctcccaaaggctccacctccaaatgccataacactggggactggggcttcaacatatgaattttgggggaatgcaatccagttcatagcacatcaagatatggtatctcgatgtttaactttttgagtagctttcagctaagtttattatctctgctctggccctggctttcatcttggcccttataagtttaccatgaggctcatagtctgcatattatagatgccaataccatagtcatttatttatttatctaatgaaagttaattacctgatctatgctggaaactgtaaataagtaaaacaataaatgtaatcagggaacacagtctagaggaggagacaggcaaaaaaaaaaaaaagcaaaaataaaagacagacaaaacaaaacaaaacaaaacaggtgcaatctgtaatcatgttcagaagataaagaaaagaccatcccgacagaagagggcactggcctgatctagtggggtggtgaagtagggaaattaaagaggagaaagacattttggacaggactccatgatgaattggatgtggagtgaatggaaggaggaatcagggtccttctagccttctagtgtttggcttcaatgacaagtcgctggtggtagcatttactgggaagggaggggctgcactgggggctaagggctgcactagggagaaatcaggatttccatcttggatatgttcagtttaagaagtctgtgacacctgaaagagaagatgtcaaacagcagggtagataattgagtccagaactcagaagagaggaatcatattacatttggaaattacaaagatgactttgaatgcctgtgagttgatggtaccatctggggaaagagtgtagggagaggagagaaggtgccccaggtgaaggcaagaggatgcccaacatttagagggtgagtaaagcaggaggaggctggatgggaaactgaggaagggcacacacagggcaaggagatggcagaagcctagggaggagagggtttcaggcagagggagtggccaattgccaagcactgttgagacagagggaaggtaagggtctagggtcatctgtggagtttgtgacagggatgttgctggtttctttgacattgaagctctagtgagtggagggagggcctgatcaaagtgggctaaaggatggagcctgcagtagtctctggaaatgtggttggctatggaggacagttgagcaagcttatattttggcagcagagctccagcagcaagggagagcttgctatagcaacacagtacagttagacagtacagggctgaaagagtgtctgtggagggcatggtgtgttatgaatgaagaggcagaggatgtgctgggcgcctgtaagtgcagtgttggagagctgctggtaggaaaaaaagtgtaactggcctgattcttttatgtgacttttaatgacatgatgaggcgaggccatccactgagcctgatggtgcagaaaagaacatgggaggttggaggagagaaggaaaactgtgaaatagtggccttggaaaattggaaagcaaaccaattcaagaaaaatagcagtttgccagtcagtatggagtgtcaatttgcagtttgagatcatgaatttaaagcgaaaccagtcatttcccttgtgtggttttattcaggaactttcagctttccagagctggtgtgaagtagggctgagggcttctgttatggaaggagggtgctgcccaggggtgatgacaatggtggactatgggaattaggctggacaaggagcgttgcaaggcaaggcagggagcagatgactggccaggggtgggatgtcgggggaggtgtccagaatttggagatttctctgaggttggggaagggtcccagtggggagcacgtgaacaggcgagcacaaggatgagaggttgctgttgatgaatggggtgtttgaggccgagatatcagaaacactatagttgctgctttcttcgggtccagagcaagatcatgggagtgggtgggtggcgtggaggaaaggaaagggtcaccgacaatcagcagagcaaggacctgggaggccagcacttctggtggttggtctatgtcctggtgattaagatgactggagttggggtggagagggcagactgagagctgggagctatgtcccaggccataatcactaggcccacttgtaattgtgtgtgtgatcaccagacattctccaaccctaactttttgtctcctgattacagtttcaaacttaaaactgacatgcaggagtgactgtttcagaaatgtgagtccatctcttgctgctcctttctgtctaagggctgattgtattggtgatttggttcttggagatgtgagtgctcctgccctcatgaggaccttccttagacctcgcctactgcctttgattcctgtggagtataaaagtcaaaggatacattagggggataaggatgataagcaagtccaagtataggtgctgaaagctactttccaggtctccaactttagctgtgctccattcagccagggttagagccgtttttgctcgttgcagagtaccctgtgaatgttatacatcataattgtatcattacacgtcataacaataggatttcaactgttattattgcacattctaattatgtaattactcagtctttcaccgattatgtaattagatttaattacaccaattgcagaaataaacgatagtcaactacaaattacttaaaaaaaaaatccagaactatgcatacgtcggcaattgtcccaaaaataagaatagaaaacataaggaagggaagaaggcttacgaaaccaattagcaagtgaaaggaatgatgtgatttggatagatctttaaggataatggcagggaatcatcttgtctagaagtttcctgtcattttttttctctgacgaagtgtggtagtaggaattgaagatgtcaaagtcaagagcgctgattcctcttggctgtgccttgaagcagagattgctctcatttccttaaccatacagcttaatgaggaagagggaagagaagacagcaagagagagaaaagagcaagagacactgagcaggggagggagagaaggagagagagagaatataacaaattggcatttcataattaaaagtagtatacatacagtacttttaaaaatatatatttttaatttcagtttttattttagatacagggggtacatatgcaggtttgttatgtgaatatattgcacccaggtagcgagcatagtacccaataggtagtttttcaacccacggtcctttccctcccctctctagtagtccatagtatatattgttcccatgtttatgtccatgtgtgctcagtgctcagctcccacttataagtgagaacacgcagtgtttggttttctgtttttgtgttaatttgcttaggattatggcctccagctccattcccgttaccacaaaagacttgatttcacccttttttatggctttttaatattccatgatgtgtatgtaccacattttctttatttagtccaccattgatgggcacctaggttgattcaatgtatttgctactgtgaaatttcatggcaatgagcatgtaggtgcatgtgtttttttggtataattatctagtttcctttgggtatatacccagtagtgggattgttgggttgaatggtagctctgatttaagtgttttgagaaatttccaaactgctttccacattggctgaacaaatttacattcccaccaacagtgtgtaaacattcccttttctccgcagccttgccagcatctgttgttttttgattttttagtaatagccattctaactggtgtgagacggtatctcattgtggtttaaatttgaatttctctgacgattagtgatgatgagcagtttttcatgtttgttagccacttgtatgtcttcttttgagaagtgtcatttcatgtcttttgtccattttttagtgggattatttgcttgtcaatttttttaagttccttatagatcctagttattagacctttgtcagatgcatagtttgcgaatattttctcccattctataggttgtctttttactttgttgatagtttcttttgctgtgcaaaagctctttagtttaattaggtcccacttgtcaatttttgtttttgttatagttgcttttaggaacttagtaaaaaattctttgccaaggctgatgttgagatgggtatttcctaggttttcttcaaagattttatagtttgaggtcttctatttaaatctttaatccattttgagttaatttttgtacatggtgaaaggtaagagtccagtttcattcttctacgtatggttagccagttatacccacaccatttatttaatagagagtcccttccccactgcttgtttttgtcagccttgttgaaaatcagatggctctagatgtgcggctttatttctgtgttctctgttcagtcccactgatctatatgtctgttttttttaccaataccatgctgttttggttactgtagccttatagtatatttgaagtcaggtagtttgatgcctccagctttgttggtagtttgatgcctccagctttgtttttttgtttttgtttttgttgtttagaattgctttggccactcaggctcttttatggagtcatatgaactttagaatagttttttctaattctgtgaagaatgttattggtagtttgataggaatagtgttgaatctgtaaattgctttaggtagtatggccattttaacaatattcagtcttcctatccatgagcatgaaatgtttttccatttatttgtgttgtctctgacttctttcagcagtgttttgtagttctccacatagagatctttcacttccttttttagctgtgctcctaggtattttattttctgtgtggctattgtcaatgggactgtgttcttgatttgactctcagcatggatgttgttggtgtgtagaaatgctactgatttttgtacattgattttgtattctgaaaccttgctaaaatcattgatcagttataacagccttttataagaatctttagggttttctaagtaaagagtaatattatcagtgaagagaggtagtttgacttcttcttttcctatttggttgccttttctttctttctcttgcctggttgctcaggctaggacttgcaatgccatattgaataggagtaatgagagcgggagtctttgctttgttcctcttctcaaggggaatgcttgtagctttgcccattcagtataatgttggttgtgggtttgtcatagatggtttttattattttgaggtatgttcctttgatgcttactcttttcagagtttctatcatgaagggatgttagatttaatcaaaatctttttctgaggctattgagatgatcatgtgtttttgcttttaattctgtttataatgctaatcgcatttattgatttgcatatactgaaccaaccttgcatcccagggataaagcctacttggtttgtggtgaattaactttttgatgtgccactggatttgatttgccagtattttattgaggatttttgcatctatgttcatcagggatattggcctaatgtttttctttttttgttgtgtctctgccatcttctggtataaagatgatgctggcttcatagaatgcatcagggaggagcccttcctcctcagtgttttggcatagttgcagtaggattggtaccagttccttgcacatctggtagaatttggttgtgaacccatctggtccaggacttttttttttttttttggttggtaggttttttttaaattactgattccatttcagagcttgttattggtctgttcaggttttcactttcttcctggttcaatcttgggaggttgtgtgtttccaggaatttatctatctcctctagatttcctaatttatgtgcatagaggtattcataatagtcttcgagaatcttttgtaattctgtgggatcagttgtaatgtcatctgtgtcatttctgattgcacttatttgaatcttctttttttgttaatctggccagctgtctagcattcttgtatattctttcgaagagccaactcttggtttctttgatatgttatatgaaaaaaggtagtacaatatattttaatgtggagaacagagtccatgttaaggttcaaatttatgattctcccttggattagtttcctaaaccccttttgagtttgttatctgaacctagaacttcagagccagtactctatcatgttctgttccagcaaaatttgcaagaccaaaaattaataggtgagaaaccaagaatttggtacatgaataaatgtcatactctattgtttttcttttccattacctcaggttattgggtagctttgatctgaggtgcctataagaattcaattagggctgtgtcacaggtgtgaccattttttttcctatgaagacattgtagagggtggtctttttctggagaacaggttttctctgttgtaactcctagaggtaagaaaagaacagtgatagctcccctaggctgagttcactcagctgcctctgtgcctggagaaaggactaacccagagcttctagagaggagaggcgaagagacagctctgtggaggcgggaatgtgcacacatctgggagagtgggcatgctacacttgcactcttccaaagagagataattggtaggtgccatttaagcatatatatacttaggagaaattacccactgagcttggccaagtactgcataaccatagaacaccagcattgctcagcatgttccccaggatcttacagcagttgacaggatgaggattacttcataagaacacataatagttggtgcatgtacttacactgctataaaaataggtcttgatgctatagagggtcacattggggaatcagtgtatttgtttagctcttgcctgtgcatgaaaaactaatagtctgcaataacacaaataaggaaaaaatgtagttttaaatatagaataaagccattttattttgagcttttctactgtatgtttgtctatggaatcccataagatggacagtagatgctaaagaactttaatctagacatattcatctctcctttggtttatgcatagctccaggattgcatttgatttttttgctgttcatgggctttcatttctgcgcacaggtttttaaaacgttttatttacttattatttatttttagagacaaggtcttgctatgttgcccaggctggagttgtgtgatcataacttactgcagtctcaaacttctgggctcaagtgatcgtcccgcctcagcctccaaggagccgggattataagcatgtgccaccatgcctggctctgcatacaggtttaatgcctgttgaggtcaacccacagcagtggaaggtggcccctagaatagagtagtgctcttacattgggcatttgagcaaacaaaccctgggaaattggaactaagagaagggaatcaagctggaagtttgtagcccaaatattcattctcatctacaaaaatccaccagaacaaataaggttaagctgatgcgtatccgcagatttgcaacagtgtggcattccactctctacttttcttgtcagaaactgagaatgtgtaaaatggaagatgtggcgatatcaagcagccaaagctattttccaaatgaggacaaaagaagtgcggccagtttacacaaagcaagcgaacttgctgagcagttataatctgcattccagattctcagcccagagccatcattcctggcttgctcttctaaacagaaatgtcaatgcaaagattaaagtggattgtagtgaggtagaaagttgtcagcagggactaacatcagagtcttacaaaggcattttacctagttaagcatttatggtatgcacgcaattttggccatcacaggctcaaggagagggattctacaaaatacatcacatcagtataggaagggccacacaacctgaacagacattagcgaggaagacaaggaaaggctgtcatgcagttagtcaccagtagcagccgttcactcagtggatctctaccagatgttcaataggtcaggtactggcttgcctggctatcattaggggattctgatcttagttctagtttgctctctctaggtctacaagcagcttctgtatttattgagtacttactaggtgcaaagtgccatgataagccttttacaaacttattattctacttagtagcactactacgattttctttatttgcttgatgaagaaagaacacctcagaaggtttcaatgtccacatggttagtaataggaactagagtttgaacccctggtctgaatccagagtccattttcttaacctctaaattatgcaatgtgttatattccaatatctatagaatgcagaacaattttgtcattgtaaagatactttaagtgtggaattaaagtttgtttagggagagtcctctattaaatttatgtaatcagaagagctttagattaacatgggacaagactattaatttcttcttcacataatctagaaaaaaaaattgacaagaaaatgttccattttgccttcaaatgaaagcggaaatatgtggttaagtgtaagtcaaaaattagatgtcaaacatctttccaggtgcatatattatataatattaaattgtcaaggaactccttgtgttggaatgcaagagaggaaaatcctttttgtgagtacaaaaaaatcatatagacataggaagtgaggtgggagcagcctgatcctaataacaagcatggtttgataaaggaaacactagcaaactagtattgaccatagacttaatcttagtgagaatgaactaagacccgcccccccctccctccctgcctccctttattccttcctttggctctccatttatttatttacttgtttagcaaagtttattgagtacttagtctgtgtcaggcacttgtgtaggttttggtgaaacagtgaacaaaacacacatgttttctgcttttatgggccttgcattccagtggagatggccaaaaacttggacagttgaagaaacagaaagaagatgagtatggttagagctcagtgggaaagagagagagtaatacgggtggtaggagacttacgtagaggcaagaggtccagttcccagttagacgaaaaaccaagagcagatagaagtttggcgcatgactttacatttgacaacaggtaacagttaatgagcccttaatcagtgccagtgactgtctaagcccttgtcctgttttaactcatttaaactccacaacaccactcaatgaattcttaaacatatctactaaatagaaaaacaatgaatccaacgtcaggttgacacatttttttcaaactcttttattgatttaacagtgagttagaacacaatgagattaattaaacctctttttttcagttttaaaaatggtgatgctgtattaatttaattgtcttagcacttataattttttaactgagaaaaagtattttgtatgtaaagagattgttcttaagctttaaattaaacaaatgttctctcgccttatggggaaatgggcttatttgcaaatggacccactcaatggttttattttgttctgttcacaccatactgtcatgttgtccatagattcattagagcgagattggtgcattaattcattccattattctgttgctcataataaacaaataatacagttttacatcactgcttctatactattagctcatatagttacaaatagtctttgtagaattgcctacccagaggtgtcacttcagaagctagtgataactctacaaatttttacaatttcatagacttttaaaaagtcgtcctgattttttaaaaaatggttttatatttagggagagtgatgactagaaggagcaggttatcaaaatctaggctgatatgagaggacaaattcaaaggaaagttaatgttaagtgatttaaatacttggttcagatggacttcctaatggaatcttcatcatatatgcagcatggagtaaaaactataagaaaccttcatcaatctaagactgcattaaaaattactatattttttgaaggtttaaatatattcagccttactggaaaaattagagcatgttgatttatatccagtaagataagttactctccaaggagaccctttgggttaaaatcctcacccacactcctcttcatctatgtattcttatgtggagattttaattcatctttttccattgttgcttgaacacctgattccttgggttggcttcctggagaaatgaatcagcaagagaaacatgagctgacttcctcctatttgatatgcacacatctctagatttttagctttgctcctagtatgcttcgtgtcaagtttaggtccagcttcctgagctagagcacaaaaaaatatatcatttgaagcaaagagagaagaacgaactggggcttcaatcacctctgtgtattatttctgatatagaaccaataagtttgtgtgcccactgcatagtaacagacccattaccctgagacagcaggtttgcagcagagaagggtttaactatctcagggcaccaagggaggagatgggaggagagcctcaaattcatctttctgaggagctctgggctgtggtttttaagaacatcatggagcgtgatgggctggaaaattggggttgttgactgatcaggggaagggggattaaatcatcagaatgtggaaattgtgttctttggtgagtcagcttcttgtggtgttcctcagaccttcctggggtcacccgtggggtctttcattcagatcagctgatgtagtagtttcactcgtatgcaggacctgaaagactacctcacggggaaagcttaacatttcttaatgttcaagttgttatctatagagcacttaaggggaactatcatcttatcacagagtctacatgattctaggacaataggcaccaaaccatgtcgaggaagcaggtcagagaatgagttgacctcatgcttaatgctgaatgtgcttcaagcttggtttattaatttattttttcccctttcttcttccctgattaattttataatgtttacaggggcaacttcatttcaatcttggtttcccagttatagaagataaccctcatagaaggagaaaagtgcatactcattagtttcagaggaatgacttttttttagttttaggcatttagattttgtgatgcctaatgacacagaaattgaatgccctcggggagactctcctgtggaattttaactatcccatagccttctcaggtcttggacctctcatggctagtgaggtcaaatggctttgctgagtggtgaatcttgttacctccaaggtcattcccattcttcttcttgcacacatgaggtgagataacctgaaactcccctgaaacacgggaagagcacacaaatcagtcctttgaatgcacctcatcctctagggattgtagtaatattgtaactgatgtaattgtcatataatttaagttcttttttctttctttcttttttttttttttcctgagagggagtctcactgtgtcccccaggctggaatgcagtgatgtgatcttggcttgctgcaacttccacctcatggattcaagtgattctcctgactcagtctcccaagtagctgggattataggaacccgccaccatgcccagctaatttttgtattctattagagatgaggtttcactatgttggccagactggtctcggattcctgacttcaagtgatctgcccgcctcagcctcccaaagtgctgggattacaggtgtgagccatcacgcctagcctaatttaagttctgaattggtatgggactatggggccatttgaaaccatgttgggagatgggacttccctagtatcttggtactgttgaattataatcagtttcctccaggtttgtctattttctccctcaattcatttatttttctcctcctccttaaacatgtattgagggcctattttgcgggtaccatgatgatgggaacccagacacaaaacaccaaggctctcccctcaggagctcacagtctagcagggaagggagacagatacacaaacaaataaattaccacttcatgagtgatgagcgccacaacagaagcacccaggaagaaaagcctagaaaaaggttcagttacctctgggtgggaggaggatcaggggaggctttctggaggaggcagccactgagttgagtgttcaaaggtggatgagtaagagcttgcaagggaatagcatgggtgtgaaacagaggagtgaatgcagcagcccgtccattcttagctgctgttcattcttacagatgtcaaatatttctgggagtcttctgtcttccactgttacaaaacttctttaaaaattgttgtgattaggataggacccttcttcatagcaggagtttcccagttctttggggaatgctttgaaaaattcatttgttcccggattgagctgttctagttgtttatcctttaaacagcaagaaaaagatggtacttccagacttcttaaaagcccaagccacttgcaggtaataacggtgtcaggttaacagcagtgacacatcttctatttcaggaaggattgaattggctcttcctggatattcatttgctgaggcttcaattccaggagattttattctttgcacatttctctgttttctttttgttcctgttagaggcagcttctcagaatgataaaaactgttgacatgttccttgcaaagtctttggcattctaaggatccatccttattgcctcatttggccttgactttacttccaatataattgcccatgacaacttattttagtagagagtgtggtagatggccatccttgggtgagtttgagggtgctgtaaatactcctatactccaaaacatctcttctaacttgcaaagtacctgaaattccaccaattagacattcattcttgaagccttttcagttgtttcttaaaatctaagtagctcttagtgtcaccctgcaccttcattaagcaggtatcacttgttggctcctcagtgtggtgagcactgagttctgggaaggacaaaacagggactgaaaaactaaggaaaaggatggcttagcctgcaccaactgtacgtgaaggaagagagtcattatcacatcagttgcattattcagcacagcttgttacctgatatctgcttacctgaagagattactgtgggttaattctagaagcttgcttattacattaacgacctacatttattgacagctgattatcttgggggattgtctctgagaatttgtgcagtaggtaaatgatgtctttgcctcaattagcactcctttgagaaaggaactaagatagttaatgttgatttgtatcactgtggtttcttatccctcttttatatcttttggaattgaacacagtattatacctataacaggtgctgagtaaatgtttgttaaagaaatcagtctgtagacatttagaggcacatatcaccagaaatagaccactagcctgatgtctggctacagtaaaaccaaacaggagaataactgttttttaaaattagaacttcattttgaaatagtttaagattcacaagaagttgcaaaaacaggacagagtttctgtatcctttccaagctttccccatgatagtgctatatgctacataggcatgcatggtatgttatcaaaaccaggaaattgatattggcgtactgctgtaaactcaagtacagatgttttgccagtttttacaagcacttttttttttttgctgtgtagatccaagacattttatcccacataaatttgttttattacctctccagtcagtatacagaactcttccatcagcacaatgaaattctcttgtgagaaaccaaattttaaaaagaaaaagaaataacttaaaaataagcaccaacatttttataaggtcacatgcgtgaactttaaaataatactaatttcaggctgggtgcggtgcctcacgcctgtaatcccagcacttaggcctgttctactctcctttgaaatgaggtccttccccagcatgccttcctgctgagcaattgctgcctggagcatctccctgagtgtctgctgtgcagcaaggtggctgccactttagggaatctcagcctgtgctccttttccaagttcagtgtgtattgtcttctccgtaagtccatgtatagagggttctttttccctgtgttagcatttgtacacttggcctggcttcatggaaactccaaactagaatggacttggaacaaatggaaatccaccaaacaaatatgaccgcatggtcacagcagcacacagacagaactttcctgtttctgatttaccaacatagggtacagagctcccaccacggttaaaattgagctaagtgagtatcaaacacacttggtcactttttaaagagaaagcacattacctgaaaatggcatctttcctcttgtcaactcctgccaaaagaaagcctcaccccctaccccctgcacaccccagaattcatactttcaggcagccctctggaaactaaggacatctaaatctaaaggtcaggattctgtgagagaaaaccagtccaacatgctcatgaaatcctaactgtgcacagggttggatggacacttaaaaggcagttaagttgatggcttgacggtatgactaaccaagttctttaggtaattaatagtggatgcagcagaagtgttcactgtaatttttctatgtgcctgggtgtgatcacatgtatacaatttgtctataatctgttatctgtaatttgtctataattgttggcatgtgtctactatgtccaggtacccctatttgaggtactgaaatatgttcattttatgtcgattctaactataatttagagactgctctccaaatagcagaaagaacagcttcttactagggtgggtttttttttttccagaagattaagagacatgtgctgtcatttcttcatgacacagattcctgcaatagacatgggggccgtggtaggagagagaaccatgtggtttaggaaattgcttcagtgatactgtggacctaatcccctcttcctaaagaactctgacagcagcaggccctgaagaaggggtatttcccaggatattaagatactgtaattatatggcaacaatgatgctcatcttagtatgtgcataggttacttttttccgtggggatttaatttgactaattgacctctgtcttcacaaccttctgcttccaattcctactctatattgtccccagaattaacttgctacaagacaagataatggtaccactctccagcatttaaatttctatcaggctgggcgtggtggctcacacttgtaatcccagcactttgggaggccaagacaggtggatcacctgaggtcaggagttcgagaccagcctagccaacatggtgaaaccctatctctaccaaaaatacaaaaattagccagccatggtggcaggcgcctgtagtcccagctacttgggaggctgaggcaggagaatcgcttgaacctgggaggcagaggttgcagagagccaagatcgcaccactgcactccagcctgggtgacagagtgaaactctgtctcaaaaactagatttaataaaaataaaaaataaataaacttctgtcagctccctatttcctataggataaagagcagacatgcttccagggcacacagatgcttcaccgtctcctgtctggccttgtttcttgccaaccttacaatctacttaggctctatacgaggtgtccttccactcccagaatgcactgtgttctctgtgcttctgtctctctgcccaagcttagccctctgcttccatcccttcccctgccttctcacgctgatgagtttctaatcctcactcaaggcctactgcaaaagttaggcagaggcgatcttctgcttccagagtcctttgcttcttacttatatttgagtactactgatcataatagctaccactgacatagcatccatcatgtgctggccactaacaaagcagttcacgtttactaactcatttatttctctcaacaacctcaggaggtaggtattatttgcattttataaatgaggacactgaggcacagcatgattaaatatcttatccaaggtcatacaaggtaatcagtagaatttttaaacaagctgctcttgcatatctgctgccagaaattaaaatctgggtagacttctctgctaaatggaaaactactccagagcaagaatcatgtcttattgaattatatgtctccaaaaccagcatagtgcctgtcaccaaagaaaaaaactcagagacatttgttgaatgaatgtacagactattatgtttttgttcaaaaagataatcctttgaaaagatgtcattcaactaagcctctgagtttttaatctataagagagaataaattgtgatcaagtggaaacagctgcatctcaaggaatgaggaaggtagtgtcgggaggaatcctgtgttttgcttctacctgcattcactcccatgttctgggtggtgctcaagtttcagtgggtatgttaaggtctcactgagtgtggaaagtgaggcagtgcactgctcattcacactggacctaagttccctatcaaggcctccatcatacacgcagggaatcagaaggctgaactcctggagaacattttagaaggagtaatttataagcacggggcttgctcttcccctgtcagaactaggaggcaggaattgtgagttaggactagaccgtaccattttttgagttgtgttcaatgtaccagagatcataaaaggcagaagaggcaagaaaaatgataacaagccttatattaagcagggagtttacaggaaactagtttttagatatccagtgtagccttgacattagagcgaagcttgatgaatctctactgaatttaaaacagtattattactcctttaagagaaatgttaagaaatatatatatatatatatatatatatcacatatatatgctttttgctgatgaattgattttgataagaaatacctttgagaatcttgctcgtaactagggttctgctaaatggtcaatatgtatgaggtgagctcactgttcacctgtcattcatgctgagatgaagaaaagatggcttcacttgagagcgtggttaacttcagggttataaatggctttcaggggtatagatgcatagagtccctacccttgcaccacccgagctttcacgactgttgggttccttcaacactacattacgccttgagagtcatcatgagctctgtaaccaaagtgttaaggatgttggcacttaactgtctcttatttatctgacccgcttcagctctgcttctataatgaactgtaactacaggaaaccatggtgtgtatctttatgtaactgatgccttgtttctcctgaattttcacaacatcttaacaattatggttgatgttaaaaactctcatgaggttatttgttgaagtgaaatacattataaaaatacatgcatatgaaaggatggccagggaagccatttcattgagtaacggccagttctgtcctcaccttccctctgtctcgcccctcctcgtccccaaagctgcctcttctcgcgtgtaatgccagcgctctgtacagtgttctgtttagagtggtttgaacatttttctgcctgtgtctctcattgctgaagtaactcacctctctcatatcgactcttacccaggagccgcactgcagactctttgatgtaggtcctttctgcatggcagctaaggccaagctgtggttttcatttgcatgatgcaacctccccctttcggttgtcgcctccaggttaaccagattcttttcctgcactgcccaagcatgttgacgtgctttccccgatggccctgaacgtggtgagcactggacgcatgcatgaattaaagcagcgagcattccaatacactgaagcactgggcctgaggcttctcctggatcatccctgtgggccctcagtttgctgtgatatcacaaaggccaccatgtcccttgaaaattcaagactaggacattggaaaagagagagataaatctcccgtttttaggtttatgctgagcaaagactaatgacaaataattagaagctaggaccagttttccaagtaacaacctacctgatcatcagtcctacatgttcctgactccacctgggtgtgcaccaagtgaccaggatgatgataccctttcatgtctttctgaataatgttacctgatttgattttgcttagatctaacaaatatctaaataaaaagatataccttttaaaagcacttcttgggctaaatgcctcaggaaatgcaattattgatcgttttcatagtgtttagtaaaactattaattcaactttaaaagaaatgaaatggtactactaggaagaaatatcgcatttgttaaagcatgttggcactgcattcaacatcattgattagtaaattgtgatcattttctctccttgaaatattttttttttgccttagggctgtctaatgacttactttaaaactgctttcttttccttattttttttaaacttgtatacttctttcttgtattctcagaatggacttttataaaacacaactgtcaggatctgttttctcactgcatttctttttttgtcatttcaaatagatactttgcattttagacatgccttggttgtaagctgagaaaaatgaaaggcgaggcattccaagctgtgataatcctagggtaggaataacagttcctagacaattcttgatgatactagcttgtcagcatcccttagcccaagagtaggcactaagcagtcagaatgaaacaaagccgaatgcttcttatcttatttttaggttttcttcatgaaatctgatcttctacaatctgggggcttagtagattgaagctcttcccacagtcctttttcctcctattctattaaccatatcccatgtattatattgaaatggactttgcttagaatttcataacatgttcttttggtaaccagtaaaaagatcctttgaatgggagcatttcgctttttgaaaggagcttaaatgtaattacagtacagacctgtgcaggcaggcgatcctgcccagcacgttggcatattctcactttatgaacgttttcatctgggggcttggcgaaggaaacatctgattctcttttgtgagattcttcagtacagagacccattcctctttcccagaaaaacacagtgattcctcataaaatgaaaggatttctgaagcccaacagaaagtggggatacagagatccattcacagagacagaagagaaaatcctaagaaatcggcttcctggggccatcctaggcctctcacagagatgtttttataatgataggaataacatctctagagaagttcaaagataggacaataaaattaaaagaagggcctgcaggaggaagcaaggagaaagacacttcaccccactgagcaggtaattcatcatatttctttccaaatttatacccaaaaatctagtggatgtcattgatatggtggaaatagctatttattattatttttctttttttgagacagtctcactccgttgcccaggctggagtgcagtggtatgatcttggctcactgcaacctctaccacccgagttcaaaccattctcctgcctcagcctcccgagtagctgggactacaggtgttcaccaccactcccagctaatttttgtattttcagtggaggtggggtttcaccatgttggccaggctggtctcgaactcctgactttaagtgatccacctgcctcggcctcccaaagtgctgggattacaggcttgagccaccatactcagccagctatttattatttctgaaacatgggcaggggaaacctaattttgataaataaatgattttcaatgttaattagaagcaagaaggaaagaaaaaaaaaggaaaagaaatgttccaggagatgagacattactttcatgaagttgtcaagaaggaaatgaaaagtgtgcatacttgaagatatgattgtataatcataggggttaataagtcattgccattttccctattaatgatgacagtttgttttaaaggtaactcatcctgtctgattttccatggtggtgttggtttctactgcccaggtcctttatgacattcctaaggagtgactctagccttgtactcagcagacccatgacttctaatcagcagcatctcagacactccgttttggctgtgaggctgctaggctctcaacaaaactcctaaataggaaaacttacaaaacttccaggccttagctgtcagccaaagacggagctaagacacagctattttatttccttgtgcaataaaggtataattgtcttctatgccagatgtcagaaagacttctaccaggtctttctctgtgtgttcttaaaaaaaatcctcaacaacaacaacaacaataacaacaacaacaacaacaaaacttcaagatgttagaaatagatataagccattataattatccttcagcatcacatataaattcatgtgtaactttaaacaagctggtgtccttgtggtgactatctatgttatgtgacattgttttctgttcgtcaaagtgaagcagcagataaatggaacaactgttttttaaacataattatttttttttccagatgttctcaggcttcctacattcaggatcagcaagtcttcagcattggtactctttgttagtgtagaccttgagtgccctgctgaggggcttgtgtgccattctgcttgagtgcagatgtgccaagaggtacaagagttggaactgtaatagacctcttaggctactggctgaaatactaaggttcagaataagaaagagatacgtctcaggcatctcattatccgcaactgtcagtccggaactcagaacaggctggttctagctgtcgattcaatagttttagcttctgtactccaaatccttacaggtagacccatagcaaggtgccattgccagggtcatgccatccaggtatgacaggactatgtcaaagccaggtaggagggcaagaaaagggagtataaggcataagttaaataggggactggtgagatgaccaggggaggcccaaagagtccaaggcaaacatctggagaaggctcagacagaattttgaagtctgcatctagtaacagcccaaagaagtcccacagtgatttgacagtctgttatgctatgggagtaccagcctacctgcccaaccgtgccctgattggccagcctttggcaaatagagagctcttcttttctcttaggagcctctgccatcccctgtatgaatatgagggcttcttatttgggaagccttgatatgaagtgccttgaaactgtaccctgagctactttctctaggatgccctctctttcagaaatgtgagctccaggctgttgctccccaatggctaggggttgttggctatccctggttatagattattgtttatcagcctcctagcacataggtggcaattttaatatccagaaaaaaaaggcataggaagcagaatgtagtggttacatgaatagtctattcttgtttccctaggactaaattcctgtagatgtgagaggagtatggatccaggggtcagaggttccattccccatgccagcatttgtgtctagattctcagctctccattcagacctgggacttctcttctctttcctttcccccatttctaatcacctcatctaggctgtcctgttttgtgagtggtcccagagtggggttggggttggatggagagcatatatttgtgctgggaggctggggatgtttgtgtgtacacgttgtgtgggtgcccacccacatgaaccactccatacctatacatggctcattgaccctgccctcgaagaactttcactctgtcttctggtatatgtgcataagtgcatatgcatttagtgctatttgaatcacctactccatcccattccttttctagataaataagggttccctaaaaaaaagggatggctagaatcagtggagggagtggaacgagtgagtagaattggtcagtcatgattcctaagacagtttagtgaaaactaaaatcaagcaatacttgtttggaaagactctgttttatgtagtagcttagctctgatttattacatagaagttgctggcaaatatgaacactaattctactctggtaacaactgtgattgaaataattgtagtctgcagataagctggagaaaacaagcattagtgggtaggttgtcttggacatcattccaaaagtgtaacagtgaaaaagtacgtgctcttagagaagaaaacttacaagagatatttacaagacatatgactggttcagatctctgcctcttatgtagatccgtgctaagccaaccaggcaaggaaagctctcatctctaaaaaaaaaaactaggaaaaaaggagaataacaaactcctgtggccactcattaaagtgacttatggctttctctgtcaagaaatcttggctaattatttagcatttatgagactgtgtggctgccttcatggaaatataattttcactttttcttctttaatactctatagaattatactaggcatttgtgaaatcttacagtagcccaatgcacagcctgttgggcatttggattacagtgcaacaccagataaagaggcagtaaagcagatacaaatgaaaaaaatagaaacaattgatcctatcagtttttgttcagttgaatgattgccttttgggggcattttctacaaacagttactattatcactattattattaccttagttttggaaattactatcacttttgagtgctgagtcatctgattcagtcttagaacaacgttgggaattcgtaaccttatccccagtttacagaagagaaaacaaagacttgaagaggtcaaattatttgcttaagatcctatagctaggaggtgatagggctggaactttagctcttccattgaattctaaaactacctagctgccaaccacttttgaggtcaacttgtaatgcccgtattttgcttttgctatacctatctaggtctatcgtggataagaaatatggaatgaagatgggaaaggagactcttagttcagatataatattgaagtcttgttagataaaatttaaaagaacttcataacaaacaaaagggttctcgccacctgagtttcttgaaagcaaatgatctgtgtgtgttttattgagaaatttataaagaattgacatattccattctctctgttagcaatctatgtcattttctttgtctcctagaagaatgttttactcttaggaataattattcaggtagacatcctgagccttacaactgctctgaagtcaactgctatcattgtttcaggagtctccatattactcaaagctcaagaatacagagtgtatatggatgctaaagagttgttagggtttttatactactttccggtatgctccaattcatttcaacatggaatacatatatttgtggctattggatcacatctcttcaactgagcagagctataattagaagcctgctgccatcaaaaggattaatagtcctgttgatacaaacccataactgatgacttcccagtaaagccagttaaacaaccagctggcatgggatcataatcgatcagtactgcagagtaacaaaaactgttttctatttacattagagtcatttcaaggtctaagaaaaatgttttaagattaaaaaaggggggcccattttgatgttatcatcattactattgatggatgattgaccacaaactgacccatcaaaggtgaccacatcttagaagataactattccatgatgtctgggataaagtgaagaggctttattctgtttggtaaaactaaaaactacacaacttattgaacacacatgccccgtccagtgtaaacatgagaagaatcgatattagaaagataaactcttaggtacacagctctgataagataagtaaaatggcagcatgaagaaaaccaaaagaatacaaagctttcagcttggatcccgtcaggttcagggcagtcttggggtgttgtcccaagttcaggagaaaatgttctatataaatattattgctttctcaatgatgaattcatatcatgtcattcacactaaatccattattgttattagctcacaaaatatttttctgtgatcttaaattttatgaataataatatcagtttctaatttgaagtacattgcaaagacttgcctccttttaaaattagtctgtctcataatattctggctggctagatgcttttattccagtgtaggcagtttatccaggatatccagaggtagccaggaaagcttcaaatcacttagacctactctcttggttatagatagattccataaaaatccatatccatatgatatcatcttttttatttattttgattggatcaaatgggatgcaaagcttattaatcatctagttcataattaagagtcttcagagtgtctaagtattatcagctttcattatcttcatccttgttctcctagaataggagagggtgagggaaaattgggccacttgaagggtcattcatctttaatcagttggataactaggagttatccctctataagcagaagaacttcccctcagccgatgggatcagtcttcctgataccaccaccccacacggggtcccagagaggacttctggggattattagtgtcccacatgacagtctctacagagcagggttagggttaggtacaggttgaatacatctgcttcctctgcattttcctagaccacccaacagacacatcagttattttctagggcagtttgtcctcctctatgaaggatttatgaatcagtcaacccccatcatttttgcatgagccccaggcgaggctctgtagatagcagacactatgtcttatgcttcctcttcctctccaagaaggctgcactccatctggagaggaagtggtatggcacaaggctagtgggtctctatcctaactctaccacatagctgcagggtcttgattggatatctgagcctctgcttctctgtctgtaaaatggggattatagtacaatatctactttattctgccattttgtgaggaccaaatgcaatagcatatgtaaattttatacaattgtcaggtattattacattgaattgaagaataattgaatatgaacataatgaggcagtttagaatttttttcctcccagtagcatgggaattcagagatgggagaggtcaatgagggcacaagtagtttgctgaatcaagcctggaggttggcctcgaagactgcccaaggtttgaacacaaagagtaatcagcagttgaagaggccacagagaaggcatagatttaaaattagggaatacatgggtcacattcatgaaataatgaaggcaagggtttggactgaaacatagtagaaaataaagtaagagatgtagaatgagtttaggttttagaaattcttcctagccaggcttagagttactatatgaaacaggcagggaccgtgatggtggatgaatgacatttttaattaaattaatttggcaacattgcagaggtgagactaggaaaagagtctagaatcattaggcttattgcattgactcatgtctgtggtgctgtgggcctgaactctgcctgtccataatcctggtgggaattgagagggccccattcaatttagaaagggactagccacaagagtgaggagaatttgaacgttggaaattatttcacaaaatgatatcttgttcctcagccagtcccgtccctagtaaatcatcttgggtgtgtgttattgttgttgtcattcttaagctacttaccatttctttatcccttgtaaatgatggtctccgtaacccctccccatctgtacttcatcatttttccttttaatcttaatctaaaatgtgctcagcaggtactctctgattgttaattggaacgtccactggtgaagcttgcacagtggcattgcaattgcttccctgtatctttttaattttttcacccccttgttcgcatctgaaacagaaaatgtctgttcaaccccttgatcccagcaattagctaagtggtaggcagctggttatctgggggctggctcaaacactgaatcatctctgttcaggtctgaatgggaagcttctcgagcagcaacacctataattagtgtgtagttgcaagaaaggttttttgggagtggcaggtctcaaagcggtgttcccagataagcagcatccccattatctgggaaactgtaagaaatgcaaaatctagggcccccaccccaaacctactaaatcagaaactggggatggagcccagcaagattttaacaagccctccaactgcatgccaaagtttgagaaccactaccctggagaagtagcttcacagggttcggcagccagactcagggaggtgggaaaacagactgcaggaaacccagggaagtttagaggctgtgaggagcgggtgatccttccctcttggagatgaggaagatgcccagaggaacaactgctagcagtgagattttgtgctgagagctcctgccctctgaaaaaaaacctgggtagccctcacttgccttgtgctctgaaaagataagttcttaagtcagtctttgggaaggtctgttggatcatcctgctcaagagtctttttgaaaattctatgactaagtagatgaggaaagagaaacatttcccactttgggtgagtctcattttcctctgtagaggcatctaaatgctgaggatgtacttacttgatggccaagaggaaataggagtttgtatttcaacctctaccctacaactgaacatttactccataagaatcaactctttactgaggctcttttgaaggtgctcagtcatggagtcctggtcaacatgctaaatttgcctgtggttttagtatcacacttgtttcatggattatgggagcctagaaatgaatagtctgccacttaccaagtatcttatattctctaattattaagaggatataagttaagttagttaacccgtagcaatttagggtaagtcagttttctactaccagaggcagaactagtgttatttcagttcataaaactccacttttttttttttcctgttggcaacatatgcccatgtaaatccttctgaggtggatatgcctcatcagactggaaatctaagtctgtgtgtgatccagagtcactttcctttgtagtttttttttctttaaagcacaatttctttgctagcttttgaagtttctgtgtatctagacaaggaaactcctcctactttacacaagaagggagaggtgtttgtatttcattctccatcctataatgtgcattaatcattaagatgaagtctctttgggaggaaaataaatcctggttgatatggccaactcttttgttgttgaaatatgtattctttttttaaaggatcattgaacttctccatgggttgtttccatttggggaatgaaataatggggatttggaagctccactctgtggtctctgattgtgcgagtccgtaaactacaggcactcagaggacttatctcagaggggatctgataaacagttctgttgccacttgaaaaaaatcaggcaggacatttctcctggggctgtagtggcaagcaggaaatagctaaaagggatagaaagtacattgcccgatcactcatcctatatgggtcttttgtcccagagtttcctgcttctctgcctgccccctgccccctcatattattgaggtatgctcatattacctgccagctccagccagaggaaaagccacccgcgccagcggcatcatttacttcctttagtatttcagctccaagtctagtacgcaaggaatgataatgaaacatgatgaaatcggttctaaattttttgaaaggattagagaaaaggaaaaggtcttgtatggcttcaacatggtttcctgtaaaccaggggtgttgttaaggtgcgtttttcaacacccatgtcctctagcttcaagccctctcactgtggccattgaacataagcattatgaggagggatgacagaaaggaccaggaaggtaagaaacagtggagaagtcactgcagccaattccttatgctcttctcaatacctgtttccatttatgttgaatccaagtatcctctgtggcattcagctcacatctctcccccaactattccattttctaccacagcctagcaaatacttttccaattagctgtatttctaggttaccaccaaattaaccacagaggccacgggattaataggagctagggaactcatgatggccccaaatatgccaccagtaactccaccaataacgactgtgagggcaactgtaaggttttggccttggtgaaacaatagtcagttttccatgatagtcttggaaaccaagccctttttttctctccccttgactgcgtatacatcaatcttgatgactgtgagtttataatgcacagctatgtgagtccccgctggcacaagtgagcacctgagtacagtagttacctacagatctccccatccttgcttgcttattctctgacacacacacacacacacacacacacacacacacacacacatttactctttagtaacgtatcctgcagagatgcattgtctcttcaaccctggagtctataggatttctggtcaacctagttcctgtacatttttcactgcaactagagtggctgggaactctgacacccatggacctttgggtcttgtttttgaaacaaaaacaagcacccccatggcctgagaattgcagaagtatcaccgattcactgtagcctggattttccttttttcatcgaaattagtacctgtgtaggagagcaggcctagagccatggcaggctgtgatatttggcttccttgcttgtgtctcctttcagcattggactaaccaaattccatgctgtctttctacccaattccctaccttagtgaaaacctggcaattgtcgtttttttttgttttttgtttttttttgaactgtttttcagtgttgttttttgttcagtccacctagtttgtgaatgcaaataaaggttactcttaatgcttgtctggagatttttccacgtgatttgggagatgatatagggcatgtttgacttgtagcagagatgaagaatggataaatccagtgcatggaacatgatcggagattcccacagactaacttaccctgcctctaagtgggccccgagttcctctactgcacagattcctgcctgttgaacagccaagcgttgtccttacagaagtgcaactatactaactggtattgcacacagtgatttccaaagtggcactactaggaaatccttcatcttccatttctcaagctggccctctcctggagggaggaggtctgtcgcttccctttagctaaagtgttttgcttctcttggtattctgtctcctttccctcacctcacttcaccttcacgttcctggcctgggtgttactatttacctactgatcacagaatactatgtgaatttccattcacagctttgagtgtttatgaggctttcctacttcccacccagcccaaaccttgggactttccacacactgatcctctgatcagtttgacacaggaaagcacacagaagtcttgtaccagtttgtatagtagtacccttttgaactggcgactcttgaagtagagtgtgctaggggtttgcattggctgctcgacacacacaccaagtcaattagcatgcatgccaaaaaaaaaaaaaattaacccttagagtactgcttcaaccttttggtttaatggtctgaatttgactggtcggacaatgcttctttccccagatccgagtcctgcacagaaagtctgtgcttaatctagccagaacctcacccaggatcctctcctctctagctttcttgagatgctcctgggtcctgaatttattaatcaactaatggtttttaaaaggtccaaaacacaaccactgtgtttaattgaaaacaggccccactgccaatgcgttggagggcatgaggaactgtgttttagctttagtatgtgtcctctcaaagaaagaaagaagttctttaagggttaatatgaaattaaggaatttggaggcctctcctgcttgtccttcctccagggtatctgcatgatcctctttagattcttagttcaactgctgaatgatgataaaaaatgatagtatataataatttcgaaaacaataaataaaagaacagtagttcctgaatggttgaatggaaagaccccttggcaatgcttgcttgatgatcccaggaggcagaaagaccaaatgttttcttttatgaatattcatttcatcgtctaccctaagcactaccacttctcagcatcgtgggagacaggatgatactacctgtcatttacctcttgctttttcttcttcctgtctaatagcccaatagaatcctgccagaatttctacaaagatttcacattacagatcgacatggctttcaacgtgttcttccttctctacttcggcttgcgggtaagtttgtgcaacattgttcagtatcacaatggggtgtttcagtctgggacccagggatcatccccctcagcctctgctctcgcagtcaagatatttccaggagaaacagcgcacccgcattctgattttcagtctgagagagagccctctccttagctaagcattttctggaattcacatcagttttgtttcaagggggagaaatagggattgaagaaaaatgatgatgtatccaccggtggattgtttctcatctctctattcacataatgccctgttcccttaaaaattaaatagaaataggctgagtgtggtggctcacgcctgtaatcccagctttgggaggctgaggcgggtgaatcacctgaggtcaggagttcgagaccagcctgaccaacctggtgaaatcccatctctactaaaaatacaaaagttagccaggcgtggcggcgggcatctgtaatcccagctactcaggaggctgagacaggagaattgcttgaacctgggaggcagaggttgcagtgagctgaaatcacgccactgcactccagcctgggcaacagagtaagactccatctcaaaaaaataaaacaaaacaaaagtaaatagaaataaacctcttcagctcttaaaattacgtttagcagtgttcacttagctgagccctgagagagcagttgtgagtatgaatgaaaggaaggtgaggagagtagatggatggaattttgtgtgtgtgtgtgtgtgtgtgtgtgtgaatgcgtacatatgtgctttatttatagttatatttacatgaatgagtctaatacaagtaaaatcacccaatcttccctatgaagctgttgggaaccacagaaaaatacactgcctgatctttctcttaagactagcatagcatatagttagtctatatagggctctctatggggcactagaaaacgtgtgtgtccaatcataaaagcatgtgctttgtgtagatatgagaaggacataatgtctccctccagaccttaaaaattaaatagaaataggccgagtgcagtgactcatgcctgtaatcccagcactttgggaggctgaggcgagtggatcacctgatgtcaggagctcgagaccagcctggccaacatggtgaaatcccatctttactaaaaatacaaaaattagccgggcgtggtggccctatgaaaactcaaaacttaccctttgacaaaagagtgtacattggatgccagcaccatgcttctcatgttttttctctttcttatttcttctttcccccagtttattgcagccaacgataaattgtggttctggctggaagtgaactctgtagtggatttcttcacggtgccccccgtgtttgtgtctgtgtacttaaacagaagttggcttggtaagtcagcctctctttccttctccttcctggttcctgagtcatggctgaaggacagaatttgcagtggatgagggggctgtctccctacaaacaatgttgtatgtattaatgtgaacaacgggctcttggagttttagaagttgatggtggcagctctctttggagcactagccccaaagggtttgcacagtttgcgcttcaggcagtgcagttttatcattgtcaaagcctagtggtcatcactgtcacagccagggcctttatgttcatggttctgtcacttttcattcaggaacttagagtcaggactggattaagaagcccatgggggtaaggccaactttccgagtggctggctcaggtaccccagaggcctgcctgccaaagttagctttggtctgcttccaaaaagtgggttctgcatggtctatttataggtacaaggttctttgtagggcagggagagatgaagcttcttgagtcatctctcaccttacaggagactgaggtccctttctgtgttaaggggagagtgctgctgggctgtactgtacagggcacctcctggaccaggactagaacactttagtggagaaagtaacttgaccagaggatagtcatggaagcccagggcttagagagacagcttcaagtttctcattgctgcgttgatttcattttttccctgaattcagagtattcctgctgtcatggggtctactagggaagaaggcaggccgaaacagaacctggaggactatttgtgggttccttctgtccttatttttaggatttttggcttaattatttaaaaagtaatatgcatgcattgtaatcaatgaaaacaaagatgtgtgaagagagcattcatcatcttttccccttgcctccatcactgcctcctcctttagacacccacggttcccaggccttcacatgtgcacacatgatagtgttttagagatggtggtgtttgtataagaaattgtttcaaataattacattgcaccacaatttggcttcctaactaatcatgatggacattccgtcagctctgtgataactcattttgtaagagttgcataaaattccataatttgtttgtatcgcagtatattcagccataaccctaatgatagaccacctgaatgttttccttttccttttattgctgctagaaacaatggtttaataaacactgttattcatatatttgtataattctaattctatcaatagttccaggttcctggaagaggaactgctggttcaaagaatatgtgtattttcttttgtgcagacattgatggataacttaaaaaatgttgtgtcaagataggcttccgctagcaatccattttgatgccattgctagcactgggaatttattatatacctagtgtcaagtatttttttaaaaaataagcatcttcttaatatagtatgtgtggtaatctctatattatatgcacatacacgtgtgcatgcatatatatatatatgtatgtgtccatatcctaaaaagatttcttttgctacagttttctcattagaattatattctcttgctctaaggaaaagtttttgttttggacctgagatatgcttggttagactggattttttgcttatcgtatcctgattcctccttattttctccgtatcgtatcctgattcctccttattttctccttatcctgatgaggctagtagagtcacacacaaatctgagaagtgtcctcagtgtaacttacgtggccctgggtgccagcagtcccagctgctgtagcttcactgctaactggctttgtgacctgggagctcaattttctttacctagcctgttgtttttcatctgtaagataaagatttggctagatgacttcgaagaatcttttagctcagaaagtctttaaggttcttgggtcattaatgggaaatttgggatctaggtcattggggtggacagggaagctagtagaattctatcagcagcacccctgagtcaaaattatggatgagttgttaacagggactccttttaaaacatcttgttgctaagagttcaaacacatacccatgcacacacagggaaatcgatggggaaggggagaggtgggatctgccttcttcactgagctgtgcttaattaccctgtgcactcgaacaaccactttgcttttctggatcctcagttttctcatctgaagaatgggggtttaaatgaaattaccttctagtcctcacacttcatgaatctgcactttctgccagtgtccattgtctcttggtcccctgtgggcctgggtgatggaagggctccctggtgactgtggtggagacatcctcctctgcagtgagcagaacatgcccccggtaaaagtgtggagcccagcttccttgtggtgagtgacacgttccctgaagcattttagggccaggagttctggtatgctttgaaatccatagccttcctgtggatgatttaattctgatttttggagatatgttgtgatctcataaaaaatctattggcacaaacacagaatgggggtgaaaaaaattgaataggaaataaaagaggtggaaatgaatttctaatgagatacatctttgtatcaactgtggtcgctttccaaaagaaatgtgctctaaatgtgcttccatttgtatattaatatttattgagcatctactatatgtcaggtaccattccagatgattgggaaacaacagtgaagaaatagagtcctatccccctaccctcctatactgcagtgttgggaaagcaggaaacactgaacctaataaggaagtaaatgatacggtatggttaggaagcataagtactattgaaattgaacacatagaacaataaccttttgggatatgaaataataataacaaaaataaaaaaacctctttcctcttgtaggagaaagcacctttaatgaaatgctttaggttctttggtagcgaaatctccttgggtgaaatctaaaactgatctccctgttatggaagagaattcagtacaataatatttcaaggaggttctcatctgacttaatacatgggttattacattgtgaaacaaccattgtaccaatgagcttccagagagaaaatgaacattcccatgagatatgacttataaaggagaagaaataatcccattaaataggggcatttcaggcatggctgcccttctcctggaaagtggaagggtgctgccttttctggctgaggtttgggataagatgcaggaaaccgaagtctatccccattctcctgcacaaactttcctggccctgctgagggtacaggactgtgcggtagctggctctgtgggagataaaaaccagagtgaatgcagggtccctgcccttacctgtcccagaacgctccccacaccgtgtttagttttcaattgtcggcatatgattgcgtgttgtatagtacagaatatattcattgtgcagatcatcctagtgcatgtaacggtgtactcatagagacactactatgtagtcagctcctactgtgtgatgggcactctggaaagcccctcacagacacggactcacttaatcctcagagcaaacctatgaggcaggacttgtcatttccccatttacagatgaagaaactgaggctaagagagattatcttgtccaaggtcacatctcctgggagtggtgggaggggtgcattccccagtatgtggtctgactttatgtccacactcttcctctgctcttctttctgtgtccttaccccttgaatgatttggagttgtgaggcctgggttgggaatgacagggctagttttgctgtgttgtgttggcatccctccatcggtgcttactcataaagggcttcactccaggcaggaagagagggaagagatcttatttaagactccgtgttctcctggctcctctttccccctcctccttgcccacctccagtttctagaaatgccaggaggaccagaagaatgcagagctagcctggtgtctcccgagtcctagtgcccctcagcagcttggagatccgacctgctccatctgggacagagagactggggcttaagaacaccccggatattggcgcagagtagattaaagctcagctctgagctccaccaactcagtccacatcttggctaaactgtttgctgatgggtcgctcagcatgagcattttatctgcctcaggctcagttatctcacctgtacaatgggctaattacagcacccacctcatagggattcaccgaggtaatgtgagtagcacagcacgtacttcatacgagcttaatgaacagaagccaggattacctcggtctctctttctaacctacccatcatattttaaagcaccgcaggagaaaacaaaccagaacagaataaaaaataaggcagcggatgtgaggacagtcatgtcggcaagcagcaagacgctgcttattttaattcctgtccccacccaccaacttattcattttgtttcccttacaaatccaaacctcactaaaataaatgcaccttgaaatgagagctttatcttattttgagatttgaataacatgctccaaggagaactcatatgtccgtctgtctcattctcttttgggaatgtatccccaaggtaggtcaatgggctgtgctgcctctgtttgtgtgtatgtttttttgtttttgtttttgtgttttggagtttcgcccttgttgcccaggctggagtgcagtggtgcgatattggctcgctgcaacctctgcctcctgggttcaagcgattctcctgcctcagcctccccgatagctcagattacaggcacttgccaccacacccagctaatgtttgtatttttagtagagacgggatcgccatgttggccaggctggtctcaaactcctgacctcaggtgatctacccgcctcagcctcccaaagtgctgggattacaagtgtgagccactgcaccttgcctgtgtgtatgtttttgttgagggtgatcttgtaggatttaaagaagggagtaggaggaaagtaatgatgcactcaccagccagttttctagcccatttttattacctactgtgtgctcagcactgggatgagaggaacacatgccgggccaccctgtatcctactggtactgtgatttccaacaccatcccctgttctttgactgatgaaatcggcatatgataagggaccatggtcattggaaccatgattggaaaactataaacttgattctattgtctgtatcagaactggccttagaccttaaaccttaaaaccttcagtaaactctgctagaaaatagaaaaatgagttaatgcccaatcacagggcagttgcaatgatgtagggtatctgcttataaatatatgcccaaaatagtcctttttttgtgtcagaaggcaataaaaacaggattatataaaaaaagcacaggtgcttaaaaacaacaacaacaaaaggacaaaacattgttcctgtttgagactaaagtttcaatctcattttggaaccaaaataaacacacatgcagtgacagcaggtaacactacccactatataattaagcccgtaattgcaaggtacaggctgtaaaggccatgggagttcagaggagtgagagctcatgtgggtgggagaatgaggataggcttctgtgagaggctggggctcagtggaggctgcaatgatgggctaagacagggagaatgaagcctagtatgtgtggagcatggtgtgtacccacagaagctaataacagcctagagaagaaagtggccttgctactggggaggatgaggcaggaggacccctgagctcaggtgtttgagaccaacctgggcaacatagtaagaccctgctaaagaaaagaaaaaagaaaagaaaagaaaagaaagaaagtcagaaagagagaaagagaaacagagaaagaggaaggaaaagaaaaggaaagaaggaaggaaggaaagaggaaagaaggaaggaaggaaagaaggaagaaagtgaaggaaggaagaaaggaagcaaggaaggaaaggaaggaagaaaggaaggaaggaaaataaaaggaaggaaagaaaagaaagaaggaaggaaagaaggaaggaagaaaggaaagaaggaaggaagaaaggaaggaaggaagaaagagagaggccttgctgagtgccaagcatcagcctcacaaccttgcaaaatggtgtagaagttttctatttccaagcagttctgtgggtgagaagtccaacatgggtctctccagaggctctagggaagattccatgtccttgccttttccagcttctagaggccacctacaccccttggctcatggcccctttctccaccttcacagccagcaactaagggtgcatccccaccttgcatcactctgatcttgcttcctgccatctcttctttgcctccttcttctacttttaaggactcttgtgattacattgggcccacctggatactccaggatactcttcccatctccaggtcagcctatcagcaaccttaatttgcctgctgcgttcatttccttctggcatgtagatgaccatattcacaggtcccaagattaacacagacatctttgagggtcatcgttctgcctaccaaaaggggcatattattattcccattattatttccaaagaggaatctgaggctctgaggggttgagtaacttgccaaagtcagagcccagaagagggtgcgctgggatccgggcccctgttcagatgtgccaaaagctctgcagagccttttggagtcctttgctccaggggtcattcacggccctttggggccatgcttcatgttattttacagcctgttagggaggagaccgttggggagagccttattgaagctcaacaccctcccacacccctcatttgcatggagtgacatttttttttcttttcatgggaacaggtgagttactagacagacttgcctgttgtctgttgttcttacgcaacttactctgaggtttgggtgccccttcctgtgcagctgcagtgactgaggggaacatattaggtctgcataacctccacctagtagccctcttttttaggaatcatgctttattgctttctggagtttacagagaaacccaaatgagaccaaagagttgtggtggtaggccaccattttcctaagggaagcggtggatggggtcagcacaccactcttccttttaatggttaccccacccagggctcagctgaagtctcaagcatctctctgttcctctgcttcaatggagcatctgggcccaaggccacctgcttggctgaagagccccgccccaccttcaggcagggtcaggatgattctgtgaatctctggaccttctgttgactggcctctgcatttggtaagaataatcaagaatgaaagctgtggcctggtttcagtttcctgacatcagtaattttcagtgtttgggatttaaacaaacacaaatagtatggtttggccagagagtggaggcagaccctggttggcatccccatatgcacagccctgcctcctgcctcccctttccctgtacttcctgccccagctccactaggctgctagctgcatcttcttgctgtctctgccctgtgcctggtcatgagtaagttcctgccctgactctgcaggttgtaatccttctccccattaaggcacagctctgactccagctcctgtgtgcagctttcccattctcatccattggaatgaattcctctctgacctttgtattgtgctgttaggattcgtgctataggagcaccatacgcagcctgctttgtactgacaggtaggactgcagcttccatgatagcaatgtggcagggactgtggcccccttgtttttcgctatgtccctagtacctggaacagtgcctgacacatagttcatacttgttgaatgaatgaatgagtgagtcttcttaggatcatgatagtaaggaacagttattgattgcttattaaaagtaggcactatgcccagcatctcacagtcattctctgagttaatattcacaataactcgatgagtaaatattcatagcccaagtttacagtttgggaaactgaggttcagggtctaagtaagtggcaggtccaagactcaggttagtccaattctggagcccatcttttaaaatgattagaccagtggttctcaaagtgtggttcctggatcagcagcatcagcgttactggggacttgttacacatgagggttcttagagctcaaccgagacccagggatcagaaaccgcgagttggagccagcagtctgtgttttaacaagcactcctggtgatctccagttttggagccaccgtactgacttatgctgggatggttctcgaatttttattagaatcccccagagtgcttttaaaactcttcatgttcaggccaagcctttaaaccattaacctaagaatctctgggtggagggtgtgacctaggctcagcttcttttaatgtttctcagttgtgtctgaagtgcagtcaggatgagaaccacttgtatgcatctcctaactttctaaactttactgtgcatgagaagcaccaggagatcttgttagaatgcagtttctgatttaggaagcctatgctaacgtcagagatctacatttccaccagctctcaggtgtagtgattctcctgctctgtggaccacactttaaatagccaggcttaccaatccacttaaaaatggccaaaaccacaattacttttgcaccaaactaatacactgtgctgtccagtatggtagctcctagccacatttgcctatttaaaagctcagttcctccatcctaccagctgtttttcaggtactcaagagccccatgtggctcattggctgcggagctggacagcacagatgtggaacattccatcatcatagacagttctgtgggaccacgctgctctagaatgagtctgtgacagcacacaccatggctttttactttttgtatgcccaggacactcttgcacatagtggaagcttagcaaatgttttttgaagtgattttgagtgaatggaccaatggtaaaaattctatatctaaaagaaataaataactttcctgaagaaatgctagagaaatcatgaatacactgttaaaaggaaccctctaccaccctacccaaattaaattaaatatacttaaggactcagtaggccaaaaagcacaagagacactggaccatgctccagctccaggacacactactctgctgctactgaaatggcattttgggctctgaaaggaaaggtctctggtgccccctagaggctggtcctgcaatttgctggatttgtgagcaattaagtagcaaggggagaggggaagggggccaatttcatcatgctcagatgggcagttcgtggttagcagtggtggagataggctcactttgaactcctataagctatttgacatctgataacttgactcaaccgctatgaccaaaagcacccctcccccaagggagttgcttctcagtgacagtgcccgaagcctggaaggaagggcccctgagtgcccccagaggtcacccactccatgttccaggcagctgactttcaacttggacatctagattccctgaagcccagagccttctaagtaaactgctgtctgtagtctgtgggtttctttagaataagaatagtgaaataaagaaaagaaaaagtatgatttccctttttgggccaggtgtccttaggagagtgggggttggggggtttgagagaaagagaaatccaaaagaaaagtgcttccataactagaataaagttagatgtgttcatattacacatattacatatatgtgtatatatatgtatgtatgtgtatgtacatacagtatataattgtctcaagtgctcttccaaacagtactatgaaataggtgtcatttgggggcccatattacagatggggaaactgaggcttcagaaggttaaataaattgctgagagtcacctagtgagtaaatggtagagctcagctttgatctcaggcaatctacctccaaagtccatgttacttgatatgatactatgctgtctctcaagctacaagttaacacatttttaataacttaccagcctccaaactacttttttcccccatgttcaccagtcccctcttctgagcttcttgacccattctatacaagtagccaaataaataaaaacaatccatgtttttaccattagtccatgttgaaatagtatcatgctagatgttatgggctgctatggtctgaatgtttgtatctgccccaaatgtatgtgttgaaatgaaatcccaatgccgtcgtgttggagatggggcctctgggagatgattagatcatgagggtggagccctcaggaatggtattggtgcccttatgaaagaagcccttgggaggctgtttgtccctcccaccatgcagggaaacaagaaagtgccatctatggagcagagaaaaaaccctccccagatgctgaatctgttgtcgccttgatctgggacattccggcctttagaactgtgagcaatcaattgctgttgtttataaattacccagtctaaggtattttgttagcgcatatagactgacatggggctctactcttggcttgagcttttttttttttgtttttttttgagaaagaattcaatggcaacatacaccttatgaatagcattgcaactgaattgctctagtgtgacaagaaaaatgaactcattattaagttctgtccctatgattgggctctgaagaaggcagcccagccaagtggaatactaaaaatttggatgtatttcagggagctcattgctgttccggtcgctgctatagctaaaactgcttctagagaaattactcctctccaagagatttccaattgtgttcccttgatattgctttgtcagggacacgctttaaataagatgccctccgtaagtagagattctaaatcctcattgatttgcatggctctgttatatgccaaattggaaataccatcctaaaatgaatgtcttcaaggaacgaattcagcagtaggtttgcatggatgccaaaacctctccagatggctgtacttcatctggggtattattggaacagcctcctcagcaacctaaatctctaggactggacgtatatttaccttcacatcatcttcaaaaaatagatgccttgattcttttccatgagaccagggccataatggattgacctggctagcagatcagatagggagaaaatgaacacctgaaaccagctcagggattcgactgcattattcagctgaacacctactgtgtgcaaatccctaggtgctaggagtgacccaaagatggggaaaacatagatcttgcctctataagatgttaataacttaattggagtgtcctctagaaagaacagtaagtttataggaatttagaggaggaacagatggaggaaagttggccatcccagcccaaagaagatttcaggtatctaaaatataaacatgtttctcctagagcaggactactcgaggtgcggtctgcaagccagcacatggcctgggagcttaatagaaataaaaatgttggagttcaaccctaaacctggagaatctctgaaaggtagggctgaggaatctgttttaacaaattctcctggtgattcttctatgggctaaatgatcttggcagtatgttagaatcacccaggaactctgacacgtcctcctggccagactgtatttctaaccaagcatatgagaattggggatgaactcagtcaccagaatgttttcaagttctctgaataatttcacttgtgcagccactgttgagaggcctggcacagtggtggttcttaaaccagaggaacatacctgaatacctgagaaacttcaacacacacacacacacacacacacacacacacacacacacacgcacacacacacacgcacacgtactttccgaaatctattctgtgaggctctttgggtcgtggtaaggacaattgctttggaacaagcacactatgtattctagatagaccagtggttctcaaactttgagtgcaccagagtcacctagaggtctggttaaattacagatttggggtgttccatccccagagtttcagattcagtacacctgggatggggcctgaggatctgcatggctaacacattcccaagtgatgctgctgctgctgatctgggggccacactttgagatctgctggtccagcccacggtgaggctgaacttgaattctagttgtagctgctatgcaagtttccaggattctggtattagagtaaaccttgctattttgtgctcctaaatatcagtattcttattaatgtaatcctttatttcatatgtttttgagattaaaatctgagtcatttacatcttgagatatactcatcctatgatattccatattacaatttcaacttgaacagcagaacccttttcccatagctcttggatcttccacttgtaatccccttctaaggtattccaagtccttggttactagtaagaatgagcacctttgcttgactttattagtcactagtattttgtctagagccaatttggttgatatcgcttcctaaactctctgaaattaggatagggtcaactcattcaggaaaatagatacagggtgtgttggagattagggaaggagaggggcggagggaggtcccaggccaaatttctaactcatccctagagtctcacctccgatgttctcccagggatggagcctcacctctgaccttctcccagggatggagcctcacctctgaccttctcccagggatggagcctcacctctgaccttctcccagggatggagcctcacctccgaccttctcccagggatggagcctcacctccaaccttctcccagggatacagtatctcagcccgctcctcgagggaagggctctcttagggtccagcctctctccaatagcagggtgacttatttgaacaaatcttctttcccagtcatctcacttgcagacactgagatgcccaggcctgggcccaagcctgctcatgagagtaagaacagatgataggtggtgagcagagctccatttttcttttttttaaatttatttttattattattttttagattgggtcttgcattgttgcccaggctggagtgcagtggcacaatcttggctcactgcaacctccgcctcctgggttcaagtgattctcctgcctcagcctcccaagtagctgggattacaggtgcccaccaccacgcccagctaatttttgtatttttagtagagatggggtttcaccatgttggacaggctggtcttgaacacctgacctcaagtgatctgcccacctcggtctcccaaagtactgggatacaggtgtgagccactgtgcctggcccatttttcataagacacactatatcactcgaaataaatgccaaacactagtgtggtgacactttgctcccatatcacaatcactaaattcgacttacccctttaaggccaggtaggaatttagcaacccagctcataaagggtaaaattagcttattatttcctgagtggattgcaaacctcactggccagattgggagcacagcagatacttcctttttgtaaaaacttggctgagtgtggtggctcactcctgtaatcccagcactttgagagcccaaggcaagaggatcgtttgaggccagcctaggcaacacagtgagaccctgtctctacaaaaatttttttaaaaaattagcccggcatggtggcacatacctgtggtcccagctactcaggaggctgaggtgggaggattgcttgagccttggaggttgaagctacagtgagctgtggttgtgctactgtactccagcctgggcaatacagtgaaatcccatcttaaaaaaaaaataaaaataaaaaattaaattaaattaaacaaacaaaaaactcagtctcatggtcttccttctttatattctcacctagccttcttctccagccctgtttgcatttttgtgaatttctcccattttcactctagccagcctacttaccaaccactcctacccaatctcagatatgttccatcgccatggttttggtagtttcttgtctagcagctgctttcttgtcttctctgcttacctgcactcaaccagttattatcctgttacttgcctcttccaaaaccactatagtctgagccactcttttgatcatgggtgatcttctgatgtggttgtgtttttataagtaacatgtacctgtcctgactcatcaactagatcaggagttagccactctggcctactgcctgtttttgtaaataaagttttcttggaacatagccatgttcattcgttcacatattgtttatggcaatgacatgaagaagataggacccaaaaaagccttaaaaaattattatctttctttttagagaaagtttgctgatccctggtctagatttgcagctatgttatatattcttttatattcctctaaatgtctggcactatgttttgcatacaatagctactaatcaattttgatgacctgaacatgaatttttctctgaaatccttataaatgtaataggaataaaataagttatttttgctcttgttattgttattattattatagctgctatgtacagtcctgctacataatgtttctgtcagcaacaattcccatatgcaatggtggtcccataagcttataatatgtatttttactgtatcttttatatgtttagatgcacaaaacttaccattgtgttacagttgcttgcagtattcagtacagtaatgctgtacaaatttgtagcttaggagcaataggctataccatatagcctaggtgtgtaggaggctatacaatctaggtttgtctaagtgtactttatgatgtttgctcaatgacaaaattgcctaatgacacatccctgtcattaagcaatgcatgactatattttgtggcaggtattggacaaagctctttaccggcctatctcatttaatcctaacacacaggtagaggaacttggaacttggagaggtgacctgtgtgacctgtcttacttgctgtatgacttcagcaagtgatacagcaagaattcgaactcacatctttgtgatctcagcgcctgagcttttaattactactatatacccacggtttagtagtaactcatacatgtgatgagagacagaaatgtttaaaagccctaccaatgagataaatcatgtaaagaaaactggcctatgttataaataggctaggagcaagatgaagcaagtgaccctgaaagcgagggcctcagctgggtgcagcagctcatgcctgtaatcccagcaatttgggaagctgaggtgggaggatcgcttgagtcctggagtttgagaccagcctgggcaacatggtgagaccccatctctacaaaaaatacaaaaattagccagacatgatgctgcatgtttgaagttcctgctatttgggggctgaggtggaaggattgctcgaggaagtcgaggctgcagtgagacaagatcatgccattgcactccagcctggggacagagtcagcccctgtctcaaaattaaaaaaaaaaaagaaagaaagaaaaagaaaatgagcgtgcctttcaattttgttccctggatgcatcactgtcttaccctagtctctgccctggttaagaaacttcataaatattgccggtttcattattatcatcatctttattattatcatcattcactcaacaaaccttaaaacaagtgtaatgtgccagctgttgtcctaggcttggagtttaaactaagatattttagccctactataggaaagatgaatctataaaccccagattgcaaacacaaatgcttacagggacaagaagataacaaatgggtgaagcaggccaggtggaggctgtctctagcaggagagtgaatgtctctcttcaaaggaaggctgttccatgaaaaagaatgaaaccctgtcatttgtggcaccgtggatggaactggaggtcgttgtgttaagtgaaataatccaagcacagaaagacaaatattgcgtgttctcattcacatgtgggagctaaaaaaaaggggatctcatgaagatagagagtagattggtagttatctgaggcagggaagggtaggaaggaggggaggatgaagagaggttgattaatgggaataaatatacacttagatagaagaaataagacttggtgtttgatagatcagtagggtgaccagttaacattagggtgacaagttaacatgaatcaattgtacatttcaaaatagctacaaaagaataatttcaatgttcctagcatgtagaaaagataaatattttaaggtgatggatgtcccagttaccctagtttgacaatatggatgtatcaaattatcacatagacactgaaaatacatccatctactatgtattaattttaaaaagaggctattgatcaacctttggcaaggtcttgctgtattgacagcttctcaatgtccactagcagttacctccttctccccttcatctttcctacattaaggcaaaaatacagtattcagttaaaactcctcctcccctccttcttttcttcttcctcttcatcctcttcctccttctcctctccctctccctccttctccttttcttttccctcctccatgtccttcccctcctcttcctctctttcttcttccttcccttcctcttcctctgaatcaatcatttttggccatagcgacttgccctttgcaaactagtatgtgttgcagtattatgatttctctgcttgagacaggaacctctggtgttttggaggaaatttcatcttgggctgctccccttcttaccacatctgttgcccagtatccaccacaaagcctgtaacttagcatctgcctataacaccaaacaggttgcatcagataaacaaaaattcttactgtggtaggtgaatattttagcaaacgtaaaatactataactcgaatttacaaactgggtcagaagtgctttctcatgttttggtgtctggagcaacgtgcacatggtcagaggacttcttatttcaattttcttgtttgtttatatttattttatgaaataaatagcctcccttccattagtacaagtacttctggtttgttagagacgaagggccccagctccactgggaacaaaggggacctataggaaacacaagtgtcgccagcttttccatgcactgacctgccctaatgtgtatcctcctcccatagcccgcagagactccccaacctcactttagctcaactgcattttccccagactgttctgaaaaatgtgttgtgacgtgctgccacctagtgaaggaaagtaggaatggacattatagtggctgtcgccctcagaatcctctttgaagcctggtttagttaacctctgccgaaataaggtcctacgtttttaactttcagaaaataactcttataagactcccaaagggtccaaagactatttagtgaagactgaagaagacaaatgtcaagtgaatagctaagagtttgaaaagtaggtatacgtgttcgggctaagtataaatggaaaacaactccccgcagaaaaccattctaattggacttgcagggcaggttaagaggaggaagtcagcccgactccagagtacagacattacctgttttcactaaaataaaggactgtcttcaattgtttgcattatcattttatctccgtagaatattttccttcggtcttttgactgaattggttttgaatttaaaagaaatattgaaatgatctgtcactttactttttgcctatcaagctgtcagcttcaaaaaatgaacaaatgtatggattctgaatagatatgtttctcagacctaaaaagaaagaaaatgtgttaataaacttgcgtctagtcatcatatgtgtacttcaatgtgtcagaactgatttatgaaccagaagtactgtgtttaagtgaggacttctctgcattcatattttaagtattattatttcattctttcctcttggggggcaagttagtataatattaccattgactaccgttgggtgggtcccaaaggtcatttctgtggaggataatagagcttttcatatgagacactttcagctgcctagcagaggcagcacactatgacaagtggccaaaaaaaagtagtgaatatttttatcgtgagttttcatggcatgaatcaactcattcttcagaagtctgtatttttttctttctattatggcatgtctgtcatttcctttgactctctggctggtcttcatctcagcaaagtggaaaaaacatattttagatgggaaaaaatgggaagaaactgaaagagggaaaatatccctaatacaaggagaaacacaactctagattccctattgccatatggaacatttaggatttcccaggaggaaacacgttcaaccagttgcttctgttacctccggactaagagggatcctgatagtagctgtggctggtgaaggaacacctctattatctggctctgggtgctgcagaaccaggcagttaacaggacaagaaaaccaaatgatccatgggtgcaaatgtgcttttgccaaagccacttccctggggtctagatagcgaagagaaatggtggcttctagaggaggaagagctaggaagtaatcctggagtccagttgtcttttcttaaagatcatgtttcaggattccaaaaaaaaaaaagaaagatcaatggcatgtaggagggtgggggacaaagagggtgaattatgagtttgtgtctgtgttttaaaatagccacctgccttgaaactgccatttagaaatgtgcatggaaggagaatcttcctgattcttagctctaatttatggccaatttatgaagtcaaggtcatctctcttcctgctggtgtgtgttcaacctggcctccctttatgccaaagaccttgagcagaccttggctaaaacccccaggtatactcccattcactgtcagcagtgatccgtggaatggattggggctggccgccttgccttgggcagagttcatgtgtcactcaggaagatgcatcaggctgctgagtcagagggagtctgccttatgtccacagagaggagtgaatcagaaagccagatgagtccagctctcaggacatgacaaattgcagaatgccgagctgggaggcttgagtacatcatatccttcttattctactgatgagaaaactggggcctggggatgcccaggaatttgcttacatttcttctcctaatgaattaattctttcatttgttcaacagtgatgccctgagtgtctcccgtgtgtcaggctttgttctaggtgctggggttagaaagaggaagagtgtcacatgaggagaagacacatgtcacaggtcattctaaaagggaaacccaactgagaatgaagagtgtctcagggcagaaaaaggaaggagcaaagacatccaccttggcactagacaatttgggtcctgatttgacagtctttagtaattagcataaccatcagtacatcatggaagcttaccccatgtaccatttcttagctctcctcactgttgtgattgcaaaggtgcttggaaggttacttgatgagcctctttctgctgctccagacccagactgtgagttccatcaaggcagggatctttctcagctctctgttttatccccagaatgggacagagcactgcacgcatgggagatactcagtaaatagccactgagtgaacaatggaatgaatgacaaatgataagggttcccaagttccattctatagaataagggtcagcaaaattcttccataaagggcctgatagtcaatgtttttggcttcaggggctgtatgatctccaccaccaccattcaactctgcctctgtggcatgaaagcagccataggcaataggtaaaagagtggacatagctgtgtcccaataaaattgtattcgggacactgaaatttgaatttcatacaattttcatattccataaaatattctaatttttttagctgttttaaaatgtagggggaaaacatttttagctggtgtcctgtgcaagaactggtggtggccagatttgtctcacaggctgtagtttaccaacccctgctataggaggaagattaatagggtaaagattttatgaggtttttaattgattcatttatccatatgtttgagcatttacttactctatgtcaggctctgtagcagacactggacatacaaacagaaatattagtcaccaatatcaagatgaaatcattatccttgatgggtcagatcttccgaggatgagtcacgaccgtgtaggaaatatgaaccccgcagtctgtttaattgatgtatgctatgcactctaaaattaattggagatttctagataaaactttccaaatgtcacaagtatccttccagcatttcatatttacagactggaaaatcaatggagatggaatcattctcccactgtctctaagttaatttgcctgtctaatgctttaacactttctgctagttctgtctcattctttacccattggagagtaccagtgggttttcagataacttccttaaagaccagaaagaaagatttaaaaaaaattccagctccttccttttggctcgggtcttccaggtctttatcttgatgaaaactggaggcaaagatgttatctctggattgtagtcagagaacaacaaaaacccccatcttttctttcccaggaaaatattaatcaaaatagaaataaggtgagattagaaccttagaaggttttgcataatacttttcttgtttgactgtttctggcctgtcttaatccaataatctattaaactctagctagtactttctttcttcatccccagcaaatttgcaatcctccagaatccttttgggaattccaaggcaaacggccttaaacaagaacataattgtctgagagattttgtttgcttatcggaactgtttggtccacagcattatctgcatgggggcataattcccttagctgcagtcagttttacaggtctttgctcataggattacagttcttttacataaaaggatgcttggaatgggggccaccaagagtgccaatatttagtatctttaactgagctcaaagtaataactacttaactagaatcagtgtgcttcttgatatctaggaaaaaaaggcaaaggaaggaaagaacaggatttggggatgtaatttgagattaataaatgattcactcaatagatacatatggatcatagcactctgcttgttgtgcatggtatactgtgaaatgtaagacacaatttcagcctagagtagcttaatctagttatagatatgggaattccaaataccttttctacaacaagagttcaaagtctttcataagtcaatataacaaaagatgaataaatagttaaataatactacagaagagtaaacatgagaagacatgcatttaaatgtatgcagagcacttattgctttggatagaattcacatgttatccatgcgttgactacaagatacatgcacatctctaaacacactcataactgaattcagcttaataggatagtaattgaatgatggaacctagtgtgcctgacttttctcagatgaaatatctggctggtgcaatgcagtaactactattaaaactccatcaggcatggtggctcacacctgtaatctcagcagcttgggaggccagggcaggaagattgcttgagcccaggggttgaagaccagcttgggcaacatagtgagaccccatccctacaaaaaaaaaaagtagttgggcgtggtggcttatgcctgtagtcctaactacttgggaagctgaggcaggaggatcgcttgaggcaaagaggttgaggctgctcagagccataatcatgccgctgtaccccagcctgggtgacaaacacagagaccctgtctcttaaacaaaactcactaggatataccagtgagtccatatgaagaatcctacccatccttctcaccttggcctgaatgaatgagtacaagtgtcagtaaaacagctgttatttatttccttatcccacatctgtccttgaaggctgtcatgtggtcaaggaccatggagccgacagacaatgtttctatcaacaggcagttcaaaccaagcctgtggctgaccatattgagtggatgaaagagccttggagggactgggccttttagaaaaataggctcgtaagtcaagagcatggtgtcagctgtctgtgtgtatttcatggtgagagtgaaagcagatctaaattatgagttgttgagtcacctgcatgaatcaattcaattcttaatttgaaaggaagctcagtgccaagggaacataacatatggaaggagtggcctcaatgactaacaaaaccagggcctattagggttgcctgagtttacttaggtgcatttataagacatgacatttccacagctgttcaactatgtgaaaaccttttgtaagcattactgtatttgataaactctgtgagatggatgttattgttatctctgaattggcagatatgggcaaggatgttccaagaggtctgcagtgtcacacaagtagtaaatagcatagcctgggctagacttagaggtcttttaaccagtcacattccccctcagcagtgagaactatggtctgcccctgctccctcagtgcacgccaattagttaggcctgtattcagatgggatgagttatgttctgattaggaaccacatgtagtatatgctataagttaaaagtaggcagatgtgcctgtagccatagggacttgctgggggagctggacttgagttgagtcttaaaacatggaaaagccttaactaagtggagtggagggccaagagcattccagacaagagaaaaaggtgagcagggggaggaatttgcatccttctttggggagccaggaagtggactggtgtgaatatttcagagtgatcatatagggaggcagctgagggatcctcagtgcgtggttatagtaactggagtggatttactctggggcaggacttactccgttgacacccttggagaagagcaggggaacaggaggagagccttcccagttaccctgttagggaccttctctttgaccgtgtcctgcagatgcacagtagttgggattcatccacctccatccacttatttctttttagctcattttgtttcattcaacagacattcccattaccacattctaggcactgtgtcaagtcttactgaagttactaaaaggaaccctcaatgaatgttttgtgaatttagacatgaatgaatgaacaaaagaaaagggacaagggctggtgagctcattcatgggggagaaggaagtaagtaaagaattccagtgtgttgcattgaatatggcaggagagtgctgggggaacaggcagaaaagagacagcctgacgtgtcccagggaagactttccaaaaggaggtggtgttctggctggttcctggagtctgaagtagaaatttgttagctacaggaggggggaataggcaggtcaaactgagggcaagtgtttgcaaatgaacaaaggcctgaaaattaggggaaaagcaaggatgtaggtgtaacttaagttgaagtggagaagaaggtaaggacagaagaccagggaaaacatttccacctgagactgaacagaaccacctggtccaaggtcacttcgttatgtctttaggcaagccctgggccaaaatggtgtggctctgggaactttgctcactcaaagccctacataagcccatctttcccataagaaggctgagggaacatctatctaagatagatgctagtaatttaacaaaaaaataaaaggcaacgatactatagggaagaaaagaaagaaaggagcggatgatgttacttggctattgttttcctaaaacaaaagcaagaaatgaagcatcttttaagagctggcctagaatgccattctgggggcttaggaaaaaaatcaaaatgtattagagctctctcagacattggatggtttatggcagcatctaaaattgctggtaaaattatgaccttgtaattcacagccgtgtcatatattctctagcacacagtgtaatttatgtaccaagccagttgcttcaaaaaagaatggggaaaaaactcacacaacacaaagtttataaaatgtggttatttttaatggataatgtctttagcctaaacctgtgttgttaggaggaagggtgtgccgttgctcaaggttattaccacagttcttgcagcatggggtgagagtatgaggattacttattacacttacgcattggctggccaggctaccatatccacaactacacagtcctcccttcctccctccctcaaagagagctatcaccttgaactccttcttcccttgaaataaaacctgggcaactaccgaagcttgaccttgactcatgccttaaacctgagcacaaaacttaacctctgctgggaaaccttcctccctatgaaacaaaggggtctcaagacaacttcttagcaagccaaaaatgagatttccactcagcttctcaagttagcctggctttgaccccagttatggagctagagaggggagaggagctgggagcaaactaggaatcatggagggggggactatggggaatatcagattcacacaactctcacttccatgaaaagggggaaggggagagagaggagactcccatggccgagtgatcaggtccagagacctccttgtggtccaggctgcacctgcaccagtctgcttgaccttgagcaacaagctatagtctctgaatcctatcaccctcacctataataaggagatgagctcttgccttcactacctaaaggagttactgtgaggatcaaagggtctattatagcttttaatcttgagccaatgactaggtcattatttttctcttgctctgcctgtatcattttctcctcatggcatacagctcttttgcctcaaagaagattcttgaggatgatgacctgcctcaaacttccttctccctaaaagtgttttcttttgttcagtttcatttctgtctttccacttattcctgattattttccctgagcctcttagagatctgatcacctcattgtataggagctatttacactccttctttgatatgaccacatgcttctctggatctgattcttaattctttgctacttccctccctgcccccaacccatgggggcaccagaagctgtgggaaaggaggcagcccatcgctaaggaggaggaggaccttgtcagggtgttggtggcgcaggtgaccagaggacagagctcactgctgtgatcctggagagggtgccaggacgctgttcccattaaaggcagtggggcttggagacactgcagcctcatgctcaggcctcctagactttggcccttgctgtggggctcgcctcgctgaaggcaggatgaagggcttatttttctggctgagatattgcatcccagaaaccacagaaatacttccaaaacccccaagataagagtgctcttattttgctccagcgtgaagaggagtttatttcatatgatcaagtaaagcaagtctggacgtcttccttatgtattttcaaaataattattttattatttaaaaaactcaacatattcatttaagagaaatggaagcaacacagaaaatgccaagaagaatgtgtccaacaaaccaaagcaaatatcataaaacatttgatcacattggataaagatcattctagatatttttctgtacagtagataagtaaataagttagacaaacagaaatttatataaaatgaacttgtactagcctcccgagtagctgggattacaggcacttgccaccatgcccggctaattttttgtattttttagcagagacagggtttcaccatgttggccaggatggttttgaattcctgacctcgggacccgcctgcctcagcctcccatagtgctggggttataggcatgagccactgtgcctggcctacatgtttttttaaaaaataaaactgttaagtttaagcttatttgtgtagtcacccagtggattttccctgtctgctgcacagacaaaagtaattcagtgagatggcagtattgctgtaaagaaagagtttaattaatgtgagtctggccaccctggaggactagggttatccttcaaatcagtctccccaaaggctaggaggttaggagtttttcaggatggtttggtgggcagggggctagggaacagggaatgttgattgcttgggggtaaaaccacaagcgtatggaaaacagtccactcgtgttgagtcctctgggtggggaccacaggactggctgagtcatgagtcttgggtccaggtggggtcagtcactcgccagaaatgccagaagtctgaaaaacatctcccagggccagtcttcagttctacagtagtgatgttatttacaagagtaattgaggaagttacaaatctgtgacctccagaacaatggctggttatcatttaactgcgcttatgtgttagcagaattcaggcacctcttataaccctaaccttatggcctttcgttagttttacaaggacaatttagttttgggaagggctattactgtccttgcttaaaggttaaactataaattcctcccaaagttagcttggcctatgcccaggaatgactaagggtagcttggaagttggaagcaagagggagtcagctctgtcagatttctcttgttgtcataattttgcaaaggtgatttcacttgaatgtagaaaaattggagaaaaatgaagcaatcgctaaactttgtaacttttacctcctaagacatgctgatatgaatatgagaaagcaattaggagaaaagatgaaggtagagtcatgttttcatttaacttttttttttttttttttttttttttttaagatggagtctcgctctgtcacccaggctggagtgcagtggtgtgatcttggctcactgcaaactctgcctcccaggttcatgccattctcctgcctcagtctcccaagtagctgggactacaggtgcctgccaccgtgcctggctaatttttttgtatttttagtacagacggagtttcaccctgttagccaggatggtctcgatctcctaacctcgtgatccacccaccttggcctcccaaagtgctgggattacaggcgtgagccaccatgcccggccaactttgttttttaatttggtgtaaaacagatgaactttctgctgtgaaagaagagaaaatgacatttcattttctcccccatcctttcccctcacttcttagttatgtaattgtttcactgtgtcagggttttgtgacattctcttctgaggctatagctttcaattctatttagccttagtaaagtcttgcattttaaagtgttcagtactcacccaggttcattttttgcatagcatcttcttattgttttagttcagatcgtaatggtggaggaaccgtttccatgggactgagaagaaagacacttgtgttgacgttcaggcatacagggaatgaaatctcgggggcagcatgggagaggcagccagagccatggctgagcgtgcttccagggaggcagaacagggcagggtgagcacacatctggagttccactgcctaaatttcaaccgcggctccatcatctcattgctaggtgagcttcggcaagatgtttaagctctctgtgcctcaactgctgccacatctgtaaaatggggacaaccatggccaccgcatgtaaggtgttgtgggaataaaatgagtgatttaaaaatgattacagaggtatctgactcactgtcaatgtttgctcttgttatagaatcacactttttggagatcaatagcaggcaggaaagaattctctgagaatctcacagtcatctcctttctttagttgtttgcagggatcttttaaaatgtcaaccctttttcaatctgcttttgtggcccacctctttaaactttttccttcttcttagatggaaaccaagacctccttacggcccataaagcctgccatggccttagagcttctgccttctcctgcaccccccaggcttcttctccctgcctcagcaatggcaggcagcaacccgctcctttggatggcacttgcccctgcgtcccctgatggcccactctctcccttcagttctccactgatctatcacctcattagaaaggcctctgtggccacacagtctaaagtgtccctcactggaatttgtgtgttttatagcaatttatacaagcatttgcttgaagcaatttgtaattagttgtttgtttgcttcattgtttagttgtttcttgatgtgacttgtctgtactactaggccgtaacctacttgtgagcagggatcatgtctgtcttattcagtattttcatccaacacagagcaatgccaggcaccagcaggtgcttaataaatatttattgcatgaaatatctctgcctctatatatctgtatctctatatagatacagatggacattgcatattaaggtacctacctgtagagaggtagctacacagctgtctatatggatatagatactcactaagtggcctgaattattcaggcaacagtctttccatttcatcattctattttctctttatatgacaattatctaagtaatgaagaattggaatcagggctaggggtggttagaggaagaaatttgaaaggcaagcgacattcattgagcattagttggtggctgcacagtgctggatgttttgtgctgtaattcatttaatttctatagtaacctgtggtattagtccattcttacactactatgaaggaatcctccagaccgggtaatttataaaggaaagaggttgaattgactcacagttccgcatgcctggggaggcctcaggaaacttacaatcacggtggaaggcaaaggagaagaaggcaccttcttcacagggtggcaggacagagtgagttcaagcaggggaaatgccagatgcttataaaaccatcagctttcttgagacttactcactatcacgagaaaagcatgagggaaaccgcccccgtgatccaattacctccacctggtcccacccttgacaggtggagattatagggattacaattcaagatgagattttggatggggacacagagcctaactatatcacctgtgaacaacagacattttctcattttacaaatgacgttgggaaagttaataagcaacagagctgggcccggagactcctgtccattaggtaatgctgcctctgagagaagcaggacttggtgagcactcagcaactttgggcagggtgcaacacctgtaaactccaggatgtaagttgctcatgcagctcccataaatgatttcaaatcacacgtgaaaaccattatgaatctgagaaatgcagaataaaaaaatcatcagggtgggtttgggttcattaaaaaaggaggtgaggctgggcatggtggctcatgcctgtaatccagcactttgggaggccaaggtgcttgagcttgtgagtttgagaccagcctgggcaacatggtgaaacccatctctagaaaaaatacaaaaaattagctggatgtagaggtgcatgcctgtagtcccagctatgcaggacgctgaggtgaaaggatcctttgagccctggagactgaggttgcagtgagccaagatggtgccactggactccagcctgggcaatagggccagaccttgtctcaaaaaacaaaaagaaaaagaaaaaaagaagatgaaatcagaagatttgggtgtagttaaggaaacatatttgtcagcagaattttgggggtgagctggaaattatggaatgcttttctgggtaaaattcaccagtctcaggccttcttttcccaaaatgtgcttcatggagtgttggattacactgaaagttggcatacattatttggaaagagaactctgtgctccagtaagtttgggaaatcctcatttaattaaagagtttcttaaccataagaatcctcagagccttccatatgctaatgtgcattgtcagtttccaaggctaggaagtggcatttctctggatctataaggtctcaagatgcccttgagactgtattctacctgatgcatggctccaggggccttagtggggagcgccacattttccatgttctcatgacagcaggaagccctcagtgaatggaggtacagtgtgcagggtcgcaatcagtcctttccatccgccgcttcatttaagcctcacatcaacctaagacataggttttattattcctgggaggctggccctgttggtgcctgtcaccgcaacccagacccgcttgcccttacctgtagtgcaggtggctagattttgaattgccagcatctgcatttctttgccagaggactttctccagtcactgaagcttgcttgtgggcctgtctacaggtcgtaagtgctagggacttaatgcctcctcaaccagtgaccaacaggaggtgttggatcaatgccccagccccctcaccccttggtcgcaaggctcttctgtttacacataaagccatgtgtagatcctggctgccagagtaccccagtgggattttcctttagttgcccacagtgataaatgcttgataacaaactctttatggatgctttcccatctcctccccactttcctgttcccttactggtgtttcctgagatcacttcccaagttaactatttgtaatcaaatccttttctcaggttctcctgcagaggaaccccaactgagacatcccattttacaaaataatgacaacagcaacaacacacacacacacacacacacacacacacaaaagcaaaaaaacagaagagtctccaagaggttatggaaggtgccctaggaaacagcttatgcatggtagaaccaggacttaaatttcacaacacatttatttagcacctgctatgtaccccttgctatcctaaatgctgagatgacaagatgaaaaagacagtcttggaccctctgtcctaaaccataggcaaaaataaattagtccaggcctgtcttcaaagcctctgcccttaaccacaatactctgctaattctcccaggatggacatttgactctcttttaaactgggagtccatttccataccacccttatgaagagaagctgtggtattcagctcctattctgccctctaggccatgaaaaaactgcatcagatcaagacttttgattcatgaaatatgctagagaaaattgcaagatttcctgactcaatgattttcctgcccagtgtaacatctctcttaattagtgagttgcaattagcatttataaaaagaaatcattgcacaaggtgagtcaactgagatgtaacatcttgctctaaacactgtcctcctggtgtgagtgggatcattcagaaattaggtatcttaatcagctgagtgctccagcattcaaatgtatctggcccagctgggaggccagagtctgtggcatgcataagaagcttacaggagggagggagttttctgtgtacactagcatttgttcatagttgcaaagtagctgtagaaactgcagatttatggccaggtgtggtggctcatgcctgtaatcccagcacttcagaagggcaagggggggcagatcacaaggtcaagagatcgagaccatcctgaccaacatggtgaaactccatctctactaaaaatacaaaaattagctgggcctggtgactctcacctgagtccctagctacttggggaggctgaggcccgggaatcacttgaacccaggaggtggaggttgcagtgagctgatctggcaccactgcactcccacctggtgacagagcaagactccatcagaaaggaagaaagagaaagaaagaaggaaagaaagaaagagagagagagagacagggaaagaaagaaaggaaagaaagaaagaaaagaaaagaaagaaagaaagaagaaagaaaggaaggaagagaagagagagagaagaaaagagagagagagaaagaaagaaagaaactgcagatttatgagaatgattgttatttttcctactttggctatttttaaagttatatttctttgttactgagtgacctccagaggcagagagccacattataattatagaaatttgatctgaatgggatattaagggttatctattaccaacactcccagtcccttcttcctcccttccttctttccttccttttgatgagaaacctaatcacaaagagagaacatgacttgtctaaggtaacatagtgtgttggaatactcctgaaactagaacctacttagaatcaccagaaacttgaagttcttttgttattattatcttctttatctctctcagcggttctgacagaagaatgatcatgaagggaagtttaaattgtcagccaatgtaaggttttgcattatttatgcacttctgccatgtgggctatgctctcagcacttttaaactatccatagtccatagttggttctgataaatgattatttatttgctgtttttcagttttgcttttatttttggtgattgtttgtacttctttaaagcagggactgtgtcttacagtccctttctggccctaacagctcccagaaaagaacttaccatgtaatagggatgtggtgacttattgatgattaattcattttatatatctggattctttccctttgctcacataaatttcctgggtttgaaatttatgcctgtttatttcttctgttggcccctcatgttgtcagtgaaatggctacaagaatggcatttgatggaagaagaaggaagacagggctggcctatttcattctctaattggataatcagtccagaataatgatggtttgattttatttgcaaacctacacctcaggcagtgggtgaagaacaacagcataagcaacaatgcgagtatggtgttcatttacatcctcagtttgtctgtggcaggaagaaagaatccacttattgctaatgataaagtagtagacccactttatttattttcatataaatcatattgtggcagaaattttcatagcccgagaccaacttctggagtttttcttatctgtgagattgttcctgttgtgtatgagctgttttgcagagatcaagaatccctgctcaagtgtgatccatcttcatcagtgaagtcatatgctgcgaggacttctgagatactgtctgctgccacatgaccactaagcagatggttttgtgcctcttgcatgggttctatgaaaagatggagatttcagtgtccatcctctgtcactcaccagtagtatgcagaaatgggtgagcctaacagagttgttaggtcaacaaagcctgccattcaaattcagatcagtgaccttgcactcagggacaaattggggttaggatgcaggctgagattggagacggattatttcactatgcatgggtttgaccaggcagcccaacagcacaggtcttgcccatcaaaatattgtaactgcctaaaagagttggcaaaagtctctaacaaaacaaagggtttatgagctaagcccatcttgcattcatttcctcattccttctacacatatttagtgaaggccactctacactggacattgggatatgaacacaaagaaggagacaagtcacacagccatttatttataggaaaaaaatgttgaaataaatacatgagctgaagactttagaattacaaaatgagacttgctaacttgttttggattggaagaaattagtttatgcccatgacatcgctttattccagactgattagaagcataatgtacatggcaggggcagggagaaggggatgacaatccattctttgaaagagactcttctccccttaggttaaatagatcgtcaagtccttgcatgtcaaaagcagagatgtgaatcactgtccttcagaaagggaagaaaacactttaagcaagtgcaaagttcccagctgtgctaggcacgatggattatacccaaagaagttggacagagaccttgacctcaaggatttcatcgtctatttgaatagaaatgatttctatataactgaattaagccagagcaataaaaatagcatgatattaggttctaaagtgagtgttgcaggaaacagaaggaacttccaaatgttgttatttacagatttctaccttgtgaaatgtagaagtacctgttctcaaattaaacattccttcctcatttcaagatgtcagctacatcagaggttgaccaactatggcctacaggctacatctggtccatcacctatttttgtaaggaaagttttactggaacgaggccaagctcattcatttttgtatcatctgtggctagttttctcactccaatggccgcattgagcacttgcaatagagattgtgcagcttacaaagcccaaaatatttatgatctggccctttacagaaaaaaattggcaacccctgatttagattatccaggttgatcctggtgctaatttagagcttcagaataaaacacagctgaggtgtgcctggtagcaaattaatcccccccaaaacaagtacttcattttccttaaattaatgttgagcatcagaattaaacagagctaaatctcatgatacctgaggcccttgtgaaaatgtttttgctgacccaagattcagtgttatgctttctgtccttacagagagctaaatcaagagtccccttttggaaggagtacctctgttctttgtaaactgtaattgaagatataactcaccgtgttcttcagtctttattcaaagccgctggcacaaaaattctgcttgaatttaattttaggatagatttgatctctgaattggctttataggttttctcagttcacaatagtcataacctagttgtttctctcttgccataggtgacaggcaatgcagagccaatttcagaagtgagctcagtagtaaactcatggcaggtgcaggatgaggcaagagagaggcctgggtgcaaacatgagggtggctcattcccagggctatgcaaaggcagggtcagtcccaaaaggagcacctccttacatgttgtgcctgaagtgtccctttctcagtcttttcttggtggtggcaggtgctgcctggcaatccccatcccttctacttttagatggtgggggccctgtcctgctttatccttgtatatggcgcttttattttaaccatgtaaactgattcaggtcctccctgtagtcaacagagataaaagtctcaataatcaaacctgtgggtacttcagtgaccagggaccaccatctgtcccctgtgggtccagacatcaggcaggaggaaaagttggggccatgtgtcagcgtcccagctggggctcaccatgggaagtgggataagggaggattattccagttctcttctttgagttcaggtttttatctacgggaagaagagggagattggacgaggttagattcacttgtctccaatgtcctgcatggggttctgggacagacaatgcctcagaaatgggaggtccaagaggatggtgactttcactgctagctgatgatgaaagggaaagggatgagggaagaatgggctgaattagaggctattccacccctctgatggttagctttcagggggaagggaaggagggagggaggctggtggggtgggagacaaagacgaattggagattaggaaagattctttggaatagtcaaaccagagaccaagcaaagcatctttttcccttgtaacttgagacctgtgcaaatgacacaggcttctagttcccaaacttaataagagtaagtgcgtgaagaagagacctgcagacacttaattcaaacagtctagaattctgggaataagttatagtacaagttatatgtggctggttatagattcagccttgatgtttatgttccctgtttcaagtcacacacatcagattactcacttgtcagctaaaaatagggccatcactggcttgcaagtcgagttaggttttatttctctatgtgcttcattgttcgttcttttgtgctccctcctctgtgcctggccccctctgccatgcccaggtggcttcacagtcccccttccccatggtcaatacttctttctaactgagggataaatgactctgaaaaggaaatgtatttcaatggggaccaatccattacacccgagagagagaggccaagtgcagggacttctggaggagaccaggaatgagtgattatgtagcatattctgtgtgaaaggcattttaaaacacacgtagatcaatttattgtcacagcccctgagaggcataattctcatcttttttctttccttctttctttctttttttttttttttttttttttttttttgagatgaagtcttgctctgtcacccaggctggagtgtagtggcaccatctccgctcactgcaacctccacctcctgggttcaagtgattctcctgcttcagcctccccagtagctgggactacaggtgcaggccaccacgcctggctaatttttgtattttttagaagagacgaagttttgccatgttgactaggctggtctcaaactcctggcctcaacctatctgcctgccttggcctcccaaagtgctgggattacaggcatgagccaccgcgcccagcttctcatctttattttttacatgcagtcatagacattcaggtttcatataagcagccagggtctctcagtgcatcaggagcagagccagggtcaaaacttacatccatttgaacccaaggcacagttttttcttactgggtaatgctgctgtcttatgggggaattttaggcatcaataaacaaggaagagaagaaggctaatttcttttgggggctggtggatcgtcccctaaaattatgtagatagtcatctttcctatcttagctaaatacaaatgtagattgtaaacagctcctcaagactgtacattttttgaggatagatttagagcaaatcacatttgtatccccaatatggttagcccagtatctggctcctagtaataattatagcaagcactgactgaacatttcctatgtgccaaggacaattttaaccgttatagatattaattcattcctcacaataaccccatgaggtaggttactattactgttcccattttatagttggggaaactgagatactttgagttgaaggaacttgctaatgctcactcccaattaatggcagagctgggatttgaatcctataacactgggcccagattccgtctcttttctaaataggtactccatgaaaatatgttgttgaataaatgtactattactttgtacagggttgagggaattagatatgacttcactgaagaggtcaatttcgtctgagttcatttcttggtcaatatttttaaatgaatgaatggattccagtgtcctttttctctgaccacttctgtctcagaaaaacaagcctaatgcagaggaagaggagcaagggagttttcccagtattggtagatgaagatctatgacttcagagacaaatgaagccctcctagaattctttcaggcagacaataccaggtggcaccatgggacacactggtgggaggagtgcaaaatgaggatacagtttatgacagttttttttggaatagacacatgtccagagaaatgggcccacattcacttgtatgtgtgcatacgtttgcatagaattctcttttaaatatttcaaatttataagaaatcctttcttgtgatgaacagatttatcttgaaaagtgtttcccattttaaaagtcagagacttgaggcagggttggaataacttccaagagcatgtggctcgtatgtggagatgccaggaaccaaatcccctgctgctggttccagggaccacatttattgccacacctacagggtcctaggaagaggctggcagatgtgccccatggagataggtggggtttttatttacagtaggagaccagattgcccagtgatgatggggcattcgatggcagaatatagaccagtttgactgggccctagtgctttggcagatttttggaggagaatttgctgagtgtcagaccctgtgcagagctttgcaaacatcgttttctttaatctggatagttcgtctgtgaagtagatgtcataatccctatttcggagatgaggaaatgaggctaggagttacataacttactcagatgtgcagctgctggtggcagagcctgaatacaaatccttcacttctccaattaaaccagccatctctgagttgcaggggtttcatgccatactgcccactggaagttgggagggaatttacagggttacagcagatgatctctgtttaggcatcaggtgaaactttagtgttccctaaattggtacaagcagactctgtttgagtatctctgttgacagggagataccatctaacatggcagcccatctcaatgtttttaataagtatattatacatgcaataaaatgcatagatcctgagggtgcattcagtgagttctgacagagatatgcaccactgtaaaatggtctgtcatccatatcaacatagagaacatttttactatcctggaatgtttctttatgctcatttctgtcaatatctgctctctcctcccttgaacataaaaaaatcactatcttggcttcaatcactatagattagtcttgtctgctctcaatttttgtatgaatggaatcatgcagggtattcacttttctaactagctcctttccttcaaaataaggtttttgatatttgtatatattgttgtatatattaataatttcttccattttattgctgctaatattccattatgggatataccacaatttgtttatcaaaccaccctgttgatggccattaggttgtttccaactttggcttattttgaataaagctgttatgaacatccttgtacaaatgattttgtggacatatatttttttttcttgggtaaatacttagaaattgagtctctgggtcataggatagatgcatgtttaacattacaagaaactgccagttttccaaaggaagatacaccattttacacttctactagcaacgtgtgagggtgccagctgctttgtttcttcaccaacacttgataatgtcaacttttaaattttagccattctaatggatttgtggtgccatcttgttgtagttttaatttttatttctgtaagttctttgtcatataaatgtactgcaagtgtttcctcttaatctgtggcttatcttttaatttattgtctttttatgagaagttttttattttactgatatttaatttatcagtctttttaaaaatgtgagtgccttttgtgtcctatctaagaagcctttgcttatccgagtgtcctcaagacactctgctgtgtttgtttatagaggcttcagatttagcttttacattgaagtcagtgatccatctcaaactaattttgtagattgtgttaggtaagagttgagactgatttctttccctttgtagatatccatttttccttccatttgtggcgatgactttatttttctcattgagttgtattggtgcttttgttgtaaatcaattgattgtatatatatgggtctatttctggactctgtttcattaatcaacttgtctttttggggggcacgacacattatcttaacacaacatagtttcattattttttgatgcctattaaaatgatcatatgatttgtcttttaatttttcaatgtggtgaattacattaattaattttcattttttaaaccaatcttttactcatgggataaactctatttactcgattctaaagtattattctttttatatactgctggattcatttgactagtatttatttaaggattgttgtgtctatgttgatgacatatatttttctgtaattttttttcttttcataatactcttattaggtttcaatgtcatgattattctggcattataaatcaagttgggttctcttttcctccagtccctgaaagagtttgtgtaatattggtattatttccaccataaatatttggtagaattctgcagtggaaactgcctgaacctgaaattttctttgtgggaatgtttttcattgaagtttccatttatttaacagatatgtagctgtttacattttctattttttcttgtgtcagttggagaaaattgtatttttaaaggaatttgttcatttcatcagggtgtcaagttttggagacataatattattcctaatactttaaaattatcctcttagtgtttgtaggacctgtagttctgtctatcatttccagacaactttaggtgttggagagttagtttctcaccaatttctttttaaacacattgagtttctttcaagtcaggaccaggccatctacttccctcttcaagatattcgtcatgctgttccctcggcctaaaaaaattgccatcaccataatttttttacctggctgtctgctactatatcattaggatatagaattattgtgaagcccttttgcgtatgtatgtcacattttccatacacattcactcagatacacatttatgtaacatacacatacacatactcagataactacttggggtttttcctttttcttttttgttttctttttttcttttcttttctttttttttttttaaatggagtctccctctgtcacccaggctggagtgcagtggcactatcttggcttactgcaagctccacctcccaggttcatgccattctcctgcctcagcctcctgagtagctgggactacaggcacctgccaccacgcccggctaatttttttttgtattttttagtagagacagggtttcaccgtgttagccagaatggtctcgatctcctgaccttgtgatccgcctgcctcggcctcccaaagtgctgggattacaggcatgagccactgcgcccggcctacttagggtttttctttacagcactttaaccaaattgttaattacagttatgatatattgtttcactctctgattatactataaatgccaccaaggctggacttgtgcattgttcctgttaatcagcaaatacccagtacccagcaaaacgcttggcacataatagatgctcaatacgtcatggtcaggtgaatgaactaatccacattgagaagaaatgttatgctttgaaaattctaccaataattttagccttgctagaggtctgaaaaaataggtggggattaaattatgaggagcctcagctaacaacttgtggaatgtggatattttcctgtttatatttttaatgtttcccctctctctgtctgtgtcatatttttgtttacactcagtaccctgggaagggagactttcatagtcactctgggctgccttaacaagatatcaaaaactgggtggctgaaataacagagatttattttctcacagttctgaaagctggacatctgagatcagcattccagcatggtcaggttctggtgagggctctctttctggcttgcaggcggctgccctctcactgtgtcctgacatggcagagagggagaaagagcaaactctctggtctctcttcttataatggcactaatctcatcatgagggccctatcctcatgatcttgtctaaacctaatcactccctaaagtacctcatctccaaataccatcacattggggtttgggcttcaacctacgactttggcagggatgggggtccataatgtagcctgtaacagagaactaagagggggctggggttggtaatgagagaagatgctgaaaacaatgggacaaagaagcagggggtgggccaaggagctctaatgagtgtctcctcccatcttcctctggatagcccagaatccctcttcttcctcagtcctgtatgtaggattagcagaggatttgcgtatttgggttatgttagtggtgggaggtggccacgacaggaggagtaggacaattcagtttttctttcttgttgggcatcacatcctctaagggaatcctccttatgagtcctcagttgttaagcaggattactaaaataaaagaaacgacttagtgggccccaaactgcagcctctctcacactctattctataccacttgatttgaggaattatagccttttctctttctatccccctaaaccatgtccaaaggagcttacatggttatttccagcgtgaagctgattgatcagctcgcaggacatcgtggatcagagtgcttcccccgcccctcttaaccgcctttctgatgtggctgcgtgcatccagtgcccagagcatgccggggttcttgcaagagggactggagggtgagggaggagagagtgtctattggctccaccaggacatagatgctggtgacccacactgcgctggacaggaggacctgtttgcagcacgggtcagaggaacacaggctcctccaggtctttccagagcattgactcctgcaagaagtgaatggaagggagccgaaagcctagcccatctccctccttctaccatgatccccagtaagattctggtgtaccgccacccatccagcagaaccggcacagagctttacagacccggcaggcgccgcaagaagtccctgggggacctgttccataatggctaccgggtgaagtctgggcctgctgctccggagaaggaggaaccgccgaacttccggcagtcattggtgtcttgctgtggtgtttgtgcatcctggggtaaggactcacccgtccatggctcttctcctcccaaaagtattccgtattcctggaggctgcctgggaaaaaaagtgctttccgtctaggctggatttggggaactgtctagtggagaggtgatagccaccttgattcctgttttcttggcatacccacccaacgcagatgtgctgggtgaggcagaaatctcgtccttcctttttagatgaatttaactggcctctagtgctcctgaatgttattgagctattaaagaatatatttcagaaatgtgggagaaagtttggcaaacgatgtaatagcttgcttcctatttattaaatggcaataattttcagtgagtcagcatttttggaagaggcatttggacctatcgataatttttttttcaggggctacagtgcgagttgtggctcattttctgtccttacatttgaccatgggagcgtggtcttgcctgtcttgggtggtacttttttattcttacccagcagagatcataagaatagttttctaggcagattttcttttctcaactgctttctgataggcatttggctttatttaggcatccataatatattacagtttaaaacaaatagattaaatgtacatttctggccataaaaatgtcagtcttagggagggatagcttttatttccaggaaagttagcagtactaggaatttctttaaaatggaatgtagtccctttgaaacctagtttaggattctgatgtgggtaggcacagctcaaatacttctgcattatgtaattgtgcctaacaaaattccagttggcaagcaataagtgaaacctagtcaatccttttcattagaactgatataaaatgtttctgtcagctgaaatgcctggaatctaaatattcatgcttctgtgtctataaccctagaattagctggccagattgttatatttcctctcccttcatcacagagaagagctgctctgtactgtaacatctggccttggagagaatcaggattaaagccactagagagaagagaccaaatgatggaattattaagctaagggcacatacactacttcctgagaaaacgttgaataattgagtaaaaccatgggtttaacttagtatccaatacccttcttacttttcctttgaaaggattaatgcatttattaattttcagtagtgagtactcactatgtaccagtcatcactgttctagaagagggtgcacttggtagtgagccagtgagtgagacacctgccccaatagagcagatagtctgctgaggaacgggcaggaggcaggcacctgaacaagcaaatgagatcattttagattgtggtaaaccctataaagaagaatggataatggcggcgaaggactgggctccagatcgggtggtcagagaagacctccattagccaaccttgcaatgatctgggggaagaacattcccaagaaaagaaacagaagggaagactcagagctgaggacgaactgggaaatgtttctggagcagagacactgtgtgcagggcgtgaggacatggagagtggtgatgaaatgagcagaaaccatggagagccttccagagcgagataaggaatctgaaagtaattttagtgagatggatgccatgtaatggcttttggcagggagcaatgtaatctgatggatatttgaaaagaccatgctggctgctttctggagaatgctggtggggcctggggggactggggtagagaagtgaagcaggaagacccgtgtggggctcttggtccagatggaggtaacagcagtgtgaaccatggttctggcagtggagagggaaaagataagttatttcacatatatttaagatgtaaagtcagaccaggcaaaatggcttatgcctataatcccagcatgttgggaggctgaggtgagaggatcatttgagcccatgaggtcaagactccagtgagctatgatcatgcaccccaggatgggtgaccatgagacactgtctcttaaaaaattcaataattttaaaacaaagtaaagaggtaaagtgagtaagtcctatttgtttacttttaaaaaatgtgtttctctacttactggctcctctattcaaatagaagacctggaagcaggagcctcacccctgtgctgcagcatctggaaccacaaggggtggtggaagcagtgactctgtgcatgtgtgtgggtgaatgaatgaatgaatgaatgggcgacaatcccagtctgaatatcaactgatgttgagcatctatcagaacaggaaccaggactgggttaaggtagggagccaggattggcaacatggtgaaactgtgtcactaaaaaaatagaaaaaattagctgggcatggtggctggctacttggggggctgaggcgggaggatcacttgagcccaggaggtcgaggctgtagtgagctgtgatcgtgccactgcactccagcatgggtgacaaagtaagaccctgtctcaaaaaatttttttaaaaaagtagggagcaaaacaacctgaacaattaccaaaggaaaggatggtgaaaaggtcagacaagcaagaactgtttatagaacacacattctgactgtgggaacaaaagcccaggggcatttgagaggaagcgagacagtcctttttctccagctgggaaggagaggctcagattcactctgtgctggggctaagaagcaggtggtcctcacagtgaccaagctggggatgggaggtgggacctgtgatggcagaagggtgcaggggaccaccctgaagaagcctccccatgctcctgggcatcctctgtttaccctgatatgcctgccctcagtttgatccctctgagctgcaaggccagataacaatgaccttgtcagacaccacaaaaataattgctcttcaggatttgcgtggggctgcagagattggaaacgacagacgtttattggaacctttcagctttttggatttaaagattaaggagtgaaagggaatggaaaatagcaaattggaaaaccctggcaggctttctggtatgggcttggatgtgtttgctgttgtgttttctgtcttgtcctctcccgagacctcacatgtatgaatctccagagtcttttctctctggggatcacaggaaccctgaagcagtgaatgagttatcatttacctgtttatccctcaatttctgtcagtacagtaactctgcttttatctgagaagggagttcaagatcccttaatctgtctggtcattgctaaaattccacagcaatagttctcaggaggagcctcacctagttgttcaggccctgggcagcaagtttcgaagggaaagctctggcagggggtcctcctcacctggagccaatggtctcatgtgactgaatcttgcatgtgagtacagggctcggagccaggaaaacctgtattccagtcctgacttgccactgactttatgactacagcaataagtaattatgcataaaaatagaaattttgatataaatattacaaaaaaattaaaaaactcaagaatattaaagaaatccaaaatgtctgcctttgtaacatggccactgtcatcattttatgcttttcttctactttttcattttacacatacctatagttttcatagttttatcatagggaccatgcacttcatcttttacttcttttttttttttttcagcatttccaatttgctatttttaaaaaattgtggtgaaaaacacataacataaaatttaccattttaattatttttagtgtacagttcagtaatgttaagtatatcctattgttgcaaaacagagctccagtactttttgatcttgcaaagttgaaactctaaacccattaaacaaataatttttcctctcccctcagctcctggtaatcgctattttaatttcgacattctacttctttaacttaacattatgtcaaaaattttccttgttacaatctttgagcatatataatatcctataaagaagatgtatcagacgtaagacctatttttggattttaagctgctttctatttttcttgcttaatgaacaattttgcaatgagcatctttgtttctgtagcatatttccatattttgttatattttcttaggctatattcccagaaatggaattactttgattaataatgctgaattactttctgaaaaggttttatcagtttataattccacaatggaattataagactatttcattgtagagtcatctccactaggtgaagctcaaatatgttgctattaagtagaataaatacagtgcttacttatttttgtttaatttgcatttcttttaattttttaaagcatttttcaagaatactatatggttattaactatagtcaccatgtaatacagtagatatcttaaacttatttctcttatttaactgaaattttgtatcctttgaccaacatctacccaaccacccttccctccaaccgccccagcccctctttctatgagatcagctgttttatatgagtgagatcacgtgatgtttgtcattctgtgcatggcttatttaacttaatataaactttaggttcatccacattgttgcaaatgaaaggatttattcttttcttggctgaataatatgccattgtgtatatatatcacattttcttcattcatctgttgatggacactgcggttgatttcataccttggctattgtgaatagtgctgcaaagaacatgggagtgcagacatctcttcagcacgttgatttcatttcctctgaatatatacccagtggtgaggttgcttgattgtatggtagttctatttttgggtttttgtggaaactttttacctttttccataatggaaaatagtactaatttaccttcccatcaacagtatgcaagggttcctttttcccacatcctcaccaacacttaaccttttgtcttttcgataataacccttctaacagatgtgaagtgatagttcattgtagttttaatttgcacttccctgataaatagtgatgtcaaacattttaaacatttactgttggctatttgcatttcttcttttgcgaaatgtctattcaggtcctttgcccatttcttaattgggctatttgctttcttgctattgagatgtgttctctatatattttgaatattaagcccttatcagatgtatagttttcaaatatttttctcccattctgtaggttgtctcttcactccgttgattctttcttcctttttttttttttttttttttttttttttttgagacagagtcttgctctgtctcccaggctggagtgcggtggcatgatctcagctcactgcaatctccacctcccgggttcacgccattctcctgcctcagcctgccgagtagctgggactacaggtgcccaccaccacacccggctaattttttatatttttagtagagacggggtttcaccgtattagccaggatggtctcgatctcctgatcttgtgatccacctgccttggcctcccaaagtgctgggattacaggcgtgagccactgcgccccgcctctcttcactcggttgattctttcttttgttgggccaagctttttagtttgatgtaatcctctttgtccatttttgcttttattgcctgtgttttaggggtcatttccaaaaaattattgccctgaccgttgtcatggggctctttctcaatactttcttctagtagtttcacagttttggatcttaagtcattaattcattgtgagttggtttttgtatatggtgcacattttttttatttgaaccaagttaagataaaatagtttcatttaattaatttatttaatgattattcactagttatattatctacttcatgatgtagctgtttgatttttgcctacttatcaactaatgataaagtattttacatacatgcttttgacattacaaagaatttatccttattgtatcatatttgattattttttcattggatattgtgtttattatgattttaaacatgcagaattttgacgtttttatggtggtggcagagcctgtatttcaaagattgtatgactccttttacacatgaaattagaaattcttcttttcagagggctaataatatatacctatattttcctcaatttttctgtcccttattatctatatttaatttttaattcatctcaaacttatttccattatggtatgaggtccatcattgcatgatgcctgtcttccttttgatttgtgatgacctctttattgtctgtaaaattcttctgataaaatagagtctatttctctactgcttagtcattgttgccatgctcttattactttcttattctattgctttgtggtaaatgtgacttagatgatttttgcattttagattttgatgaaatttctttgtggcctaatatgtggtcagtttttgagactgctcatggctgttattaaagaatgtgtgttcctagtttactaatatatgtgtgtgtctttctgcccatccattcagatacatatagatacgaatatatcccaagggattaaatgctacttaaatgtcctatatttgtgcattcttgtcatatttgctttatttatctcaaaggaatacttttaggtgtataaagtttttttttgttacacattctttgtggattgtttcttttatcaatatgagatattactttttattctttttaatataatgtttatatataatttttatataactttttgcagtagctgccactttatttgatatagtcattgctctatttgttcctcttttctcagcatttgccaggcacataatttccattctttcatttctaacttttctgtatgtcttgtttgcagtgtatgtcttttaaatagcatgcgcctggaatttattattgttgttgttttcatatcatgtgaatctctgtctttccataggtgaaagtaattttaatttaattttattatgattacaaatatatttggactcttttgctattgtaactatgttttctgattaatataccttttattttttttttcttttcattggatgggctgaagtttttgttctttttttcttttctccatttgattaaattcctttgtccttttttttttctctaggctatggaatttatatccttaaggttttgatacacatactttaatttttttctgttaatatatatgattgattgtatcctatcaagacaagaatttctgcacacctttctttttcccattgccctctctccttcacacctccatcttccatttatttccagagattttaattttggatcattgttattatttattcatttaaaacatactcagtcaacacataaatgaatccattacttttatcttttccatgttgcttcttgtatcttgcttcttttggatttatttttctttcaactggctaagtatatattacttggttcaaattaatctgtcctgagaattgtaaagatatccttcttttgttttcttgcaaccagtgaagccaggagaattgtgacaataatttgactcttgttgctttgaagggatttatttcttcacattgatgttataaaatttatccacaatatgcttggatttaggtctttgaaaatgtaatctgctggccgtggggcggagcttgcagtgagccgagatcgcgccactgcactccagcctgggcaacagtgccagactccatctcaaaaaaaaaaaaaaaaaaaatttaacctgctggacacttaaaagacctttccaatctgaggatacaggtcattctttcggtctaggacactttaatgttattttaaatgtttcctgttctctatttccttcattttttccttctggcagctcaattacatggatgtggaaaactttattcctgttttctgggtctcttagtttttcttttgcacttttcattcctgtgcccctttgtatgaagatggctgtgtgatagttcagccctctactttgctgtgtggctatgcccattcttctattaagctggccttttaagattttgatgttcaaaattttaattgctaagatatttagttgattttttgagttgagatagtttttcacaactctttatatttttcaaatatttttctaaagcattttttgtttaatgctttgttaatgttgtatccttaagggtcagttggcctgaagtgtaatatgtgcatttcttgaaggaaagttgcctttcctcaaatgtttggcaattctttagttcttttcttcccttttcttttcttttttttttttttttttgagaccgagtcttgctctgttgcccaggttggagtgcagtggcgcgatctcagctcactgcaacccctgcctcccgggttcaagcgattctcctgcctcagcctcccaagtagctgggattacaggtgcctgcctccatgcccagctaatttttgaatttttagtagagatggggtttcatcatattggccaggctggtctcgaactcctgacctcaagtgatccgcctgcctcagcctcccaaagtgctaggattacaggcatgagccaccgtgcctggcaacagctggataaattttcacgaagagaatgcatttgagaagccaacgctcagctcaagaaacagtcattattgcctgtcaccccctagtcccttctcctggcaaccttctagtcactacaccccacaaaggtaaccactctcctgaccatatatcagttttgcccagttttgaacttcatataactgggttatatagaatgactctgtgtcaggccttgttctctcagtgttacgcctgtgtgattcatccatgtggttatatgtagatgtacttgacagtgtttttttgtttggagatggagtcttgctcagcctcccaaagttctgagatgacgggcatgagccaccgtgcttggcctgttttgtgcttatctttgcatttgagatcttctgttagcctatatgtgaatgctgtctttgtgtgttgcagtttgtctggggagtactgagatatgctactgtgtgtttctattcggtaactggtcttacagctgtagagacagtgtgtttcttccaagagttacagtttactcaggatattgctctattttaacacctcaagtgtatgcacttgctgccatgtagtgactactcctgtttggcaccccagtcaatcagtgttattgtcacagcctccttcttcccagggtcagccacttcatttcaccttttggatggttgttttcttcttcactgtgatctctgcatcccaaccacccccccatcaacctcagtctttatgtattgaccaaagacatttttaatattctgtttatcattgtggagatagacatatgtgtgtgtatatgtctttctttctcattatggaaatatatacatggaaaatatatgtatatgtttatataaatataaataaatacatatatatgtatgccaagtcagtttctaacagagtatctacccacattttgtgttcgtctgttctgtgttgtaatctcctcttccattctttttgttcttgtgggattctgctgtttcctaccccctcaacatttgtattagtttagtgaagttttgagagggggcagacataaaccattgtgatccatctgctatgtttaactagaatgctctggattatcattttaattcattgatgaataatttatgttggtattatatacagaattttggcatctatgatcttagtgatattagaatacagatgcttctcaatttaaccatggagttacatcctcacaaacccatcataaactgaaaatattttaagtttgagaatgcatttaatacccctcacctaccaaacatcacagctgagcctaccctatcttaaacatgctcagaacacttacattacctactgttgggcaaaatcatctaacgcaaagcatattttataataaagtgctgaaaatttagtgtaatgtattgaatactgtactgaaagtgaaaaacagaatggttgtgtgaatacttagagtatggtttaaggtgaataggtatcacttttgcaccactgaaaagtcagaaaatcattaagttgaaccattgtaagttgagggccatttctactttatttttgtgctttgagagtcagtttttggtcctcagtttatgtttattttataatataagttagtagctttagatctcgttttgtattatggaacagtttagaattttaataaaatgtatgtgcaataatttaatcataaattatatatgggtgcagagtctgtaagggaagctgttactatatatttcaatgtatatctcaattgttatcctataatggatttcttttttgtgtgtatcaagtttcgaagtttatatttttcagaaagtcatccctctcactgaggtttttcacagatttattagaatatcattgtggataatttttttctttttttattggatcagccagaactttattttgtttgttttcttgttgccattgtttgctcccataaaattctacagatttttaaaattttttttcatatttattggttttctggttatttagtcataaacactgaactaaaaaatcagctttctcctattgtcaagactacttttcccccaaaatcttaagctgaatgctttgttttataaataatcttttattgtattattgatttaacttctagttagccagtatgttctttaaaattgatttaaatagactggtagtgtgcttagagggtagattactggttttaaattactcaagtgattactcggattaacggaaatttgctatttggagaaaaaataaagcattctccttttggcatactactagccaaaataaataaatacatcctgatggattaacaagttagaggttaaaaaaagaaaataaaagatactctaaagcagtgattcccaaacttggctgtacactggactcatcctcatccatcatctggctgtacattagaatcttcttgattagaaaaataaagcttggtccttttggtgcactgttaaccaaaataaataaatacatcaaaacagattaacaaattaaaggttagagaaaagaaaatatattctgaaccactggttcccaaacttggctgcacactcgaatcagaatttataaaaattctgatgcccagcttgtatcccagacccgttgaatctggtgggaagcaggcctcagtattgctttaaaatcctcgggtgattgcaatggcagagaaatctggggaccactgccttgcagccttgttttcccaaagtgtggtcttctgaccaacagcattgacgatagcttagagcttgttagaaatgcacagtatcaggccccatcggagacccactgagtcagaatctggatgtttacaaatgccaggtgattcatgtgcacaatggatttgaatcccatgcctccaaagcaagtgtagaaaattagtgtccatggcctatttatatgaataacattttactggaatatggtcacacctatttgttttcctattatttacagcaaagttgagtcgttgtgacagcctaaaatatttattaatatttactatatgttcatttatagaaaaagtttgcaatgcttcttaacctggatggctcattagaatcactctggagccttaatactccctctgcctgaatgtaccccacgcccattaaatcagaatgcaggtagggggtgctgagacccaggtgtcaacaattctaaaagtttcccaggtgatttaaatgtacagtcaaagtccagaaccagtgccccaaaagtacaaagaaaaaaaaatagatgcagtaaaaaaaaaaaaaaaaaaattatctatatgatggggatggccaaaaaaattttaaaaaaagggaacatggtagaaagattgatatattttagaattcatggggaaagaaacccaccttaagtaaaatttgacagtaggaaaaatactttaagccaaattgagaagaatgacgaacggtgggagataatatatggtatacaaaatcttctttatatgagaacataattgtattactacaattaagataaatacacaggcagactggcaaaggccactctaaagcactttagagaagaaaataaaatgactaataattatatgaaaaaataattagcttcatttgttaagatagaaaagcaaaataaaacagccatgagctcttatttggggtctatcaaattaggattttttttttaatttttaaatttttaatttttttgagatggactctcactctgtagcccaggctggagtgcagtggcgagatctcggctcactgcaacttccacctcccaggttcaagtgattctcctgcctcagcctcccaagtagctgggattacaggcacataccaccacacttggttaattttttgtatttttggtagaggcggggttttaccatgttggccaggctggtctcgaactcctgacctcaagtgatcagtccacctcagcctcccaaagtgctgggataacaggcatgagccaccatgcccgacctcaaattgggattcttaccctcgttctctccctttcccctcctgccttcctgccttcctgccttctctccttctctcccttcttgccttcatgccttctttccttccttccttccttccttcctattttctctatcactgtactcaatccagtgggaatacaggcaaaagagcatttgcatactgaagggaatgcaaattgtgaggacaagttggtaagatgtatcacaagtcttgaaagtgtgtgcttgagtcctaatgtctgaattggaaatgactggctgaagtctgtacagggcagtggctagaagcttgggctttgtggagtttgtcacatttgtggtgaaacttggctctgttgctttcaaactatgctggatacactgtctcatttgtgtctccttagctattttcttctgtgtacgtattttttaaaaaagatatagttagaagttttagtgtgtgtaagtaaataaacatactagatatcatcaataataatagattaatgtcattgtcaacatcatcatttcaccagtaatttaaaataatagtaacactatatgtactctgtgtgtgtgtgtgtgtgtgtgtgtgtgtgtgtgtgtgtgtgtgtgtgtttgtgtgtgtgtttctgggctttctagtccagtttgatgacttttctgtggcgtgtgtacactcctacgctattgtaattcttcatatgatgaaattaccatttactgagtgcctccagtatgcccacatggactcttagaatgctcggtcttctggtatgcagatcaccagggtaggatttaatgcccatgcctgtgagggaataagggtggagaactcaggctggctgcagctgcctgggaagcctcaacccatcccacaggaaaaagtatcccaaattgaggcaaggcagctgacctttgtccctacatcagccagcatttgtgtgtggtggtggggggggggtgggggggtggggggcaccaccactgacaggggatgtagccccaggtgaggcagctccttgtagcagagggcagttctcatgaagggactagctctgagcctttagcaggtcactcttcaagagcccaggacaaataaggtccctgaagaggggatttgggctgtaccctacagcatctgctatagctcatgtcttttattcatttaatgcagtcttggatatgataccctagtattttatttaggattattgttgttagtcattagtgtgataagcttgccatttaagaaaaaatgcaagggaacttgtgtccaggtaatgccaactttctaaaccaatacagagcatggaaaaacacagataagtccatttttaagaattgatcatataatagagaatagatagagaagttactattttttgaaactgtaaaaatctcacttgtaaaactctctgaacctggaagcttttggggagggcatgtaattcctggcttttggtatatacacattttcttcttcacaactctattatagctattttgtgttaccttagaaaatcatttatttcagagattttatagaataaaaataataaaagatattataaaatagagaagatgaataattgtcaccaaagagttccccctctcacctctcttatcttggtctcctctcttagcctgaagtcgctgtctgtagtcttctgggctctttctgggtatagccagagtggtcattcgttaaggcttttccctgatgaggctactttctacttcccaagagtgcagccctgacctctctcaggggaccccgcagggcttctggcttttccctttagtaggcaacatatagtctcagaattctgaatgtggattatctaacctttaactccgccgtctaattatttctcaaaactttgattcactcattcagttcaaacaaggatttattgagccttcaccttatgccagacactatgttcaatgctggaaatatagccctgaacaaaacagacatcagctcctcccctcatagagctgatgctaaagagaggaaggcagaaagtaaccacataaccgaggtgctagtgcttcatgctgaggagaaaagtgaagcaggaaagaggatagggagttgcacgggtggtgtgggaggagttgcatgtttaggtcgggtagccagggaaagtcacgctgatcaagggacattgagtaagaacccaaaggaggtgagggagtatgccatgtgggcatctggcaaacagcattccaggcagagaggctgcatgtgcagaggccctggggcagtagcatacctgtgtgttcaagtgtcactgaagacatctgccagatcagcggacagtagtaggagtgacagtaggaagccatcagatccaaaaggagatagtgctggtggtgggatggtgttgctttaggcctttgaaagactttgacttttactctgtgtggaatgggtggcattggaggcttctgagcagagaacacaaggggtccagggcagaaagcggttaggaagctgatatggtttggctgtgtccctacccaaatctcatcttgaattgtagttcccataatacccctatgttgtaggaggggccctgtggaaggtaattgaatcatgggggcagttacccccatgctgctgttctcgtgatagtgagttctcacgaaatctgatggttttataaggggcttttccctcttatgctcaacacttctccttcctgccaccatgtgaagtaggatgtgtttgcttccccttctgccatgactgtaagtttcctgaggcttctccagccctgtggaattgagtcaattaaacctctttcctttataaattacccagtctcgggtatgtctttattagcagagtgagaacggactaatacggaagctattgtgaatgattcctgaaagaccaaccatttctccagatagtctggcttgatctgaggatgaaatgtagactgacttttttaacctatggagaacttcattggctcatttgcattagtgaaactcagtgccataaaaatgcccagtatgaggcagtcaaataagcaaaggccacccttgttcagcccacaggggtcttgctcctgcatcaccctgggtcccttttgcaaggagatatttccctctggtctccatgttgggaaaaataaatgattctcctgcaagccagtttgtttttctctcatatgtatacactattgatcttatcctgtctgcctgcttgcttttgttaagaaggtgctcagagctagatctgcagtttgtgtctagcaagagtataggaccttgtggcctctgcattcatttctttcctgcccttactttcatgcaccttaattaaaagaaaagcttttattctactatatttgtgtaactcactcaaatgtggcaagctgccaatcagcaatggatatacgatacaaacaccatcgtttaaagataaaaagaagaaatccagtttgaagttcaggttgtttgtattctatttttagttccataaataaaagcatatctatgcacacacagaatgttcaggattaaacactaaatggctaatacattgctagcatgtatttctacaggagtgcctcttatctatggttttgcttcctgaggtttcagttatccccaggcaaccgtagtctgaaaatattaaataggaaattctagaaataaacaattcataatgtttaagttgcatgctgtcctgcttggttccatctgggacaagaatcctccctttgtccagcacatccgtgccatctgcactccctggccattagtctctcagggcacttcagtgggcagaccgatgtcttgctgtaacccatgttacctgtgttcaactaacccttattttacttaataacggccccaaagcgcaagtatagtgatgctggtacatattgtcataattgttctattttattattgccattgttaatcccttcctgtgctaatttataagttaaattttaccgtaggtgtgtgtatataatgcatataggatttggcactatctgaggtttcaggcatccactgggaggtcttggaatgtatccctcaaggaacatggaagagtgttgttatctttcatagtttcagtgctaactgccagtcgccttctactccacgtttctacatttgtcgttttagctcagcaatatgcgacagtgatactggtatgagataacagtctaggttgggctggaaggttaggaccagcagtagagtctgttataaatttaatttccagcccttgccccctcccattctgatttagcaagtcttgtgaacctctttggaaactttatgcacacactgagcaaacaatgtattttttgagaccttagaatttgaaattttttttgttacttttattcttgaacaaccacttgactgggtataaaaatcttgggtcaaattctgtttgtctaaaaattctgaaaattgcccaattgctgtttaacacttttttttttttttttttttttttttttttttttttgagacggagtctcgctctgtcgcccaggctggagtgcagtggcgcgatctcggcttactgcaagctccgcctcccgggtacacgccattctcctgcctcagcctcccgcgtagctgggactacaggcgcccgccaccacgcccggctaatttttttgtgttttttagtagagacggggtttcactgtgttagccaggatggtctcgatctcctgacctcgtgatcctcccgcctcggcctcccaaagtgctgggattacaggcatgagccaccgtgcccggccaacactttttgttaaatataatgatcttagttacattaacggtaaataaccccatcaacactggtggtttatttttattgcttgattttaatacttgaaatgtgaaaatgaaaagccagatgcttcttggcattggtctctaagaactgatccttcattttaccttttagtctccagtcattttttcatatctcaaaagttcttttctgttatgtcctggcctttgcttatgatcaatgtgatgttttgacttccctttggccaacacattttatccatgggttggatctctgtgatttctactgtgtttctattttctgaagtttcatcttttttttttctccctttctcatattttctctgctttctgaggtgacttcttagttttgtactctgcgccgtggtcggttttcagcggtgctaagtcagcctttcatcagctcagttacaactgtgcttttggccgtgagcctttttatttcatcaacatcccgtctcatctctgcaattatttaataaaagttatataagtattatttagcatagaaggagaatgttttcaaaaaaagtcttctgttcatgatggttaatccttttcagatgagaaattatttttttgagccaatccttttctccctctttccttgtacagattttcccccaccccatgaactttaagttaattttcccttattacctaaacagctccacgttgcgtgcagttagtgtactcctcattcaagtagaaggtagtaaggattccttcccaccactgtgccctaggctgccctttactggctcacgggcgtgggagaacaaagccccacccacgggcgtggagttgtctgtcaactcagtgcactggagggcttcgcactgcctttggcacgtggcggtgcttaataaaatgcttctagaaagtctgcaaaagaaaatccccttgggagtgggtgtgacattcaatgtgtctcaaagcggtgacaaaccagcattttgtaagtaattcccttgcatgatagccaaattattatagcccaggactgactgaatgttttgaccatgaatttcacctgaacagaaatataattcactcttagctattaaaacataataatttgcatttttaaaatgtccttgatgtgttttccttctccatctctcttctgccacctaaacactgatgcttctttttcattcaagagaggttgttgatttagaaaggacaaaccatttatcttaacacttaataaaaggggaactatataaattttgaatcctgaagttgtggggtgtgatatctcactgatcttttttttttttttattgggaggaaaatatagaagtttgtagaaaacagataacactgtgggctgtactcttcattttatcagggctgaagataaagataaaaaataaaatccatcaaagacataaggttatccgatttattctcaatctgctcttagcacaagggttaccctgagctatcacaattcctaggatttttcagagacaaaatcctgccagataactaggtaacttagaaacagtgctttcaatcagagatcaccaaatgaaaagtctcattaacctggcttctccccatgagcccttcctctaaagaggttccaaacaggccacctttataaagagaaagtccatttcccagtcgagattaaaccagtcaagaatcagaatgaaggaatatgtctgaggtaccagctggtttatcttctgcaagaacttcccatcccttcgacccttgggaactgtaaatcaaatggcagactgtgaacattaaaatcacacattgaaaataatgcatctctatttcattcttttttccaggtttgagatttttaagagctctgagactgatacagttttcagaaattttgcagtttctgaatattcttaaaacaaggtaagatgttcttcgtcatatttttttcattccagtcccctatgccaagttgcaaatatcaggtgtgcttgctttcatcacaatgacattattaatagttatattattcacagaaagagtgatctaacacagagagggagagaaaaccagagtagggtttgagttgctctcttctgcagggccagggaactatgtggtgaaaagagagaaatagctgtgcatgcagggaagtagggacacttttagggacacatagctgatatctgtgtgcccagtggggttgcccagataagagccacggtgtcaaggggaaaggtgcacagtgaatgagggatagatttgctcattgattgggaagtccttgctgccagattctaaatcgcccctttattacatcactaaataagaaattgaacccagtcgtaaaggcaatagaagcaatgctgtgagaggcaatcacaaacctcatacggcaaacagaaaatcatttcatttcaaagcacattttagatgttcactttatatccgtatagcccttggggctttctctgtgaattgccttttgggggaaaacctacaaacctcctgccgaatgcaccatgaatacttctgttaactgcgttatgatctggaaaacacaactggaccaggaggaaaagcccccagaggatccctttcctgatgacctgccggcttgcagagctggcctgaaaccaaggctgtcttgatgaataaactaataaaagaggttagacgtgctctaatggagaataagtacaggccataaatttctcttctaggaaattacactctaagaagctaacttctaatgttccatttcctctttggttgcccttcatgcatttgataaatgattaaaaacaggacacctccatattttgtgatttgtaattaatatatctgtagttttgaggattagattcagcatcattttcctggtaacacaggctgggacctagcttcctgaatgaacctgacacagccaacaaattcaacctatgattggctttactccttgggtgttagtgttttttttgcttgtttattttattttgctttaattccaaattggtttcctctctctgactgctcatctatgtgactgtgaggtcaaattcactttctattagtcaagttgaaaagaaaaagagaatccaatggcactgaagtctttaaaagtatgtcctcctgccttttactgttcattatcctgagataagaatttatcagtcctctgtttattagcaataatgtaatattattcacatacagtgaatattgtatttcttcatgtttttctgattgccaataaccttgatttctgccttttaattattcttctatgtgctagaatcatattacttttgaaatgtaaacgatcaatgaagctagcatctcgccaatatttacgtatgtcagattcactccactagactgtgttttaaagatggaacgcgtgagtacccagcaccaagcatagagccttgtccttaagagacacttacttttttggtagggatggtgttttgtgacactctctaacattgggtagtgtctgtctctccctgtttcacaattacatcatatgttagggggatttttattctctgatgccagcattttgagaaggttccattgctctgaggaatactgtctactccctggaccgttttagaacttgagaaaatgatggaccatctgaatatctttttctgactttctgctaggacactcacctctctttcctttggatgcgggaagtggctgtgggatccctggtgtcagctcacctgccaactgcactcagtgctgcctctctcagtgcagagcggggaagctgaagcagccagccaggggacgagggagagaatggccctagggaagagtcacggggtggaaggctgtctgggcatctgccatccgggccccaaaacagcctttttccagcaccccacttcccactatatgaaactcttgttgttagagggtgctttttgccacaaacccacaacctgggttttcagagttcctttcacttatggtcataaccagatggttgagataattcagcaagcctggagtgagcacccattggtatcagcagcaaggtgcatgctaggagtcctgctgtcagagaacttgctgcgtagggggccaggccacctgacggtgtggttaatgctgatgtcagcatgcccaggggttgagaggggagtaactaagctgggcttagcctgagttgcagggcagtcaaggatcttttcgaggagaaggttacttttaggtaagccttgtagaaaaaagtgtcatcctcatggggctgggcatgtgaggggtagggtgggggttgacttctaatcaaggaagatgctaacagcacactggtgtgagagcataacacttggggaaactttgggtaattctgcactcctggacattaagcgttctgtgatggaaagaggaggatgaggttaagagggtaggaaaggccaggtcaccaggcacagaagcaaacgtcatgtaattgtaagaaatctagaagctttaggacaactctctgaggccattctctctccaggtgccagcctggctaatcttggctccttccttttgggcatccccaagtgtggatcccaaagttctgtcccagagaaagtgcagccttggcttttgtagggttttggacttttgagcgattctcctgtgactcttccatactctgctgctttcatagcggtccttccagaagggtgggttgggggacccatgtaatcgtctttagggagattttgtctggctctctttggcggtgaattcctgccaatctgtggcattaggcagggatggaggctttgcaatgcaatttgaaataatgatttggagttgctgtttcatttccagtactttggctgcctcactgggccaagagctgaaagaaataaggcagagaagcataaggtgggcagaaagattgataaagaattaagaatgcagcagaaggaaaattaaagtgcatgggatgaaatgggcaaatcacaattatgtgaccagcatcagggccctttcccaaactgcaagcccatagggggcctagaatactccatagcctgaaacggccaattaaaggggagacaaggagactccctctcactatctgaggttttggcagtttctcagttgccctgcaaactggagatctaacacacaggtgctagaacacttattctactgtcagaggaaagtcagcagctgtgtttaaaggctgtaattccacatctcattgactgtggtaaatattgatgactaaaacatggatcactcagcaattttttccaaaatgggaatttccttattgtttcctctaatttttcttttcttttcttttcttttttttttttttttttttttttttgagatagactcttgctctgttgtccaggctgggcgtgatctcagctcactgcaacctccgtctccagggttcaagccattctcctgcctcagcctcccgagtagctgggattacaggtgcctgccaccacacctggctactttttgtatttttagtagagacagggtttcaccgtgttggccacgctggtctcgaacttttgacctcaggtgatctgcccactttggcctcccaaagtgctgggattacaggtgtgagccactgtgcccagcctgtttcctctaattttgaaaatatgttcatggtaaacattgcaacaacacacaaaatcacataggataaagtaaaattgcctccacatcacactactttgagataatgattacatctactatgtcaccttttgtttctcacatagcattccatgatatgcatgagtcatcgtgtacctaaccaatatggttttgggaggcgtttttgaaactaaaacattactactgacatgaacttagaaatggctccaagataaagtttgtaaagaagagtattctatatggagactgcaagagatgtgcagggagaggccaaatcatgcaggttcttagattcatggactttactgagaacaaatgagagctgttgaaggattttaatcaggagaggaaatgtggttagactgacattttagaaagatccactattccaacagttgtatagagaatggggttgaagcatcaaagacctcatagaccataagaccaattaggaggcagtagtccagggaagaggtattagggcatggccttaggcagtgcaaattggggcagagaaagaagaagggatctagagataattaagggattgaattggcagaatttcactttgttccactcatgttgtcattcagaccatttatgttagtgtggtgcagtccagttaactttttagggggtgggtattttacatctgtccagcaaagagagcagtaaaacaaacaaggccagcagcacctggcagtaccagaaacaaagagaaaaattagagacaagcagaacagggacaaacgtacacttctttgtacaaagtgcatggcattttctgtgttaactgaaacatgtcttgttaaacatatagaggacaaaggaggccccagaagctctgggtttacagctgtaatctctggagccagaccttctcttgcagcatccacagtttcttggaagaggtctctaatctacaagaatcctgtgcctgacctatcatgattcactgtgtccatcgatgtgaattagaactcatgggatggagactcaggaattgtataggcaacatgagaatgattgactttagttggatcaggtgttgatgataagatcataatctccctcaaagcttaggaagcaggctagaatctgaatggttcaaatcattctaaccgctggtagcttcgtgtttggcccagatccctgggcttgaccaggaaggctatgactatctccacacagagatatataacctttgctatgcagagcacacagccctgctcctggcgtgcctcactctttcttcccaaggagccctacttaacctggcaaggttcacatttcagactgtggagaatgcccaccaggggttaaccttgcatcttttgcttgtagctttcagatgtgtggtcatacagtttcatttagaaagcaaattcctaaacctagggatctgtgataatactgatgtcataaaaataatcagatttcagagctaaacatggactgttttagcaacaatgattaaatgttctgcatatggcaagagctccctaacgcactactaatatcactgtaaccatcatttagagtttagtaatcaccatatttaggtcatttttccaaagcaccaaggagactcagactctaaataggtttaatatctcaagaggactctacatggttgttggtgggacactgctgtgttcaggtcccaagaatccaggagtatgtaagtgaagccacttggtatttaacgataccctgagaaaatgaacaacacacacctccctaagaggcctccctttgtcgccggctatcagttcttcatctatttcttaccctccaatgtgggagcacaccttagaggacttacaaggtacaggcaggagagaattctgcttaacacaacatctaacacataataagggctcaataaatattggcaattattataatctggtaactctagaaatgaccaagagagacagaatggacattttggctgtttttccaagttttcgagccagaagaaagttgttccacacattttgaaatatcagtctcacccacaaagttgaatctgtttattctttccatgaactgtcagaatcaactctggaaaaactaagactatggattcctctgtgctcttccatagaagaagaaagattgttgttatgagcattaaatgacttagtatacataaagcacaggtgatcctaaagcacttaggatggtggcacatgtggtgagcactgggaaagaactgtaaacaagctagctgaaactattactgtgatcttaaatgcctagaatttaaatcattggttctccaaaagagaggtaagagagggcagtcataacagagatgaactgaccaaaactaatgggttgggcaaccctgtaggctgcattaagccactactgggaaaatgcaagagctagaaaagagagttcttttctgcaagatgcagcaaggaacacaagagtcaaatagcaacctaaaactttacaaaagacatcttaagtcagtaggatcaattaccaatgaatggctggagttgagagccggggaaagtcactttgtcttgcagatggatggaacgactttaaggaagcagtagggattgaactgggctttgaagaatggggaaatttgactagatgggaagggctttcaagttgagtaaatagtgtaaacaatagctatagtaaataggtttagctggcatggcagtttcaagagtttatgtgaaagaggggtggtgggagagactgggacttcacaaggtgttgacaatggaaggagagagtttgaatgtcatcttttagtcaacaagaagcctttggacagtgaagtgacctgctgacagcagcgttcaggtataccccagtgggactgaacaggatgcagtttagaaagagagcaggggcagataccagtgcactcagtgcagagtcacgggtctgctatgctccagggacccagggctcctggaatccagacagacaaggcctcagctcttagggacctcaaaatgtcataaggtccagttgatccactcaaggaacaccagtgaatgctaaagctattaggtataaggtttttggggagcaggatattcctgcagtctcggggcctcactcaaggtggcatattcattacaaagggaaatgggcacctctcagtggagacattagcatttctgccttagccacatggatggagctagtcattgggctgggatatcctgatgtgatgccatccccgaagagattcttaacagaaatacttaagtagggagctatgtaggatgatcaagtctagaggtctaatgtacaacatgaggactattgctaataaaattgtatggtatttgggatttttgttaaatatgtagattttagctgctcttgtcacacacaaaaacgtaactatgtgagatggtaggtaatatcatgttgtaaacctcaaacatacacaataacatttatttaaaaaataaactgggctgggcgcggtggatcacacctgtaatcctagcactttgggaggccaaggcgggcagatcacctgaggtcaagagttcgagatcagcctggccaacatggtgaaactccatctctactaaaaatacaaaaattagctgggcgtggtggcgggtgcctgtaatcccagctactcgggaggctaaggcaggagaattgcttgaacctggcaggcagaggttgcagtgagccaagaccgtgccactgcactccagcctgggtgacagagtcagacctcgtctcaaaaaataaaaaataaaataaaaataaataagtaaataaacaggatccagaatatagaacattatagaagacaacctaggttcacacaaaatttaatgtcattacaaaggagtggtgtcaattatacattagaagggactgaagctgggattggcaaactatagcccatgccggctgcctgtttttgtaaataaagttttattggaacaaagccatatctattcctgtacatgatgtccaaaagctgctctgaagccacagtgacagagttgagtatttgtgacaatgtctatatggcctgtaaagcctaaaatatttactctctgtccttgtttcctgacagttggatttaagccacctaacagccaaatgcagtgcatgaaacttgggtctggggggaaaataaaaaaaaatcaataaacataattttggggcaactggagatatttaaataaggtctgcatattaaatagcattactgaatttttatgttttaattttctgaggcgtgcaatggtattgtgattatgctgtgcaatgcccttcttcttaggagttgggtgctaaagtatttagggcttgtgccatgatgtctctgatttattggtaaatggtttagcaaatatatatatatatatatgtacatggcaagaagaagagaagaaaaaagggcgggggggataagagaaaaagcatgtagggagataaagcacccgtggtaaaatgttaataattggtcagtctaaatgaagagcgtacaagtgttcattatactgttctttccacttttctgtagatttgaagagttttttaaataaaagttaatttttaccaaagttaaatttgttcctctaggctctgtcctgaccttcatcccagcagcttcctccaccttccagaattcccttataatggagaaatggttgggagttagatgtggcagcctctcctgctaagcgggtgctgttaccctgtaaggcagccccagcagggccttcccttggtaacgtggggattttgcttgttgtctcttgcacagtaattccatcaagctggtgaatctgctctccatatttatcagcacgtggctgactgcagccgggttcatccatttggtgagtaaccttgaagacccttctgctctcgcttgcctgcaacaagaccctctctgagtcattttattacctaaaatttatcttgctggaaattaacttcacctcggttgtagacaggaagatgggaagcaaccacacaattgtctgggtttccaacctttttaccccaaactagttccaaatggtgagtaatgtttgcactattaacctgcatttttcagttcattgctcattggtattgtcatgggggctttggtagattttccttctgtctgcaataactatagtaagccacaagatggcagtgcttcctaagcaaacacctggaaaaggtctggggacaaggttggaagttggacccacacctcctagtaaacaacaaattcagatccctcaatttctttccacttccgccttacgaaaagccacctttgattattttgtctgatttgtacctcaaaaatgttcattctttttcattagtgactctttgaaagccttgtattaagtcaagcccctcacaccacccgaaggcagactttccccctgcttttagagagcacagccattgtgggaagtgtgtttcatgcaaacatagactgttacaactggaaggagcctcgtctagctctgagactttggataaagttgaccaccagtggctgagcctctatttgcataagggatagaaggacgcgcttagctacccacacttgggatttaggtaattatcacccaaaggaagacaggcctgggatggcagtggttggggcatggggcctcacgtagtcaccagatctagagtctcctgcccagcccttaatgctgatgggattcatggccaaaatcaaccttaatcaccctaattcttgctgtaaccaagcacgaagcacccaaatcacatatgtggaggagatagttgtctttaataagatgatgaccccaccttactacgggtattagtgaagtcccttcaggttcaccaggaaacttttgtgaaaatggcacattgaggacaaactgatgtgtgaaagaggccaggccctggaaacattttgcagaggcagaggtggaggcctgggggccaccgtctacaggccctgtgggtggatcacaggcatatttgagtaaaattgggcccgcagctccctctctcctgagagtatctaaagtacctttcctgcccacctactagccttgttggcagatcaaatatgatggaaggacaggaaagtggggaaactgcagtctcgggccaaagctctccaaatccagccacacccatttgttgaagttttgcctctgcagagttgaacaggacctgtgtcgcccacaaaactgaaaaagtttgccagcccttgatctaacgggctgtgccagtgcaagctgttctcatgagctcactttccatgcccctgtgaagattccagcagcctcaaggctgggaccaccattgccaatttgcaaaggagggagagcagggccagattccagagatgctgtttgaatcagaaataagcagggcccatatatactctttggataaactgatggaaggaggcagccccctacggaagtgtttagaatttctgtgggagaggcagatccaggccatctgggccttagaaacccattgaggaaggtcagggacggaatctctggctctttccttgaagagagtgctctaaaacctggccagaggcaatgccctgaattttagctggcttcccacattttaccagaagaagagaaaaggcctagagatatttcccttcttgctttccctctctgtctcaatcagccaggaagacatctcctgcagctgcttctccactttctctgtgtcctgctcaggagctctgcatcctgactcacagaactcagcccgggaaccacacatctcgtgtggagagtggtgtgcagtagcaagtggccttcgagagtgccgagcttccgcgtttattgcatgtatacacttcaatagcatgtttttcttttttctcccctgtcccatttgctttaggtggagaattcaggggacccatgggaaaatttccaaaacaaccaggctctcacctactgggaatgtgtctatttactcatggtcacaatgtccaccgttggttatggggatgtttatgcaaaaaccacacttgggcgcctcttcatggtcttcttcatcctcgggggactggtaaaaaaaaatctttattatgatgttgattttgatggctgttaatattttccatgatacatttccttaaagctttgtattttagactgtattctgcactagaagcaagccttaacgttacaatcaggctaagtaaatccaaacacgatggtgacttttctgcataattcttggtgtattacacttgtcccatagatccaggcacattgcccttgtcggggacagccatttagccaggagcaaacctaattgtcttaagaaaagtgatgctgttaataagggagagtgtctaccccttagcaatgtaactcagcatctggtatgctacaaggacagtggctgtcacctgcctctggtagaagctgtcgatactttgtagagacagtttgcggtttcaagagctctcccttcccctttatgttcctcccctaacttccaacaaacactgtggctggggcctgccctaaagagaagggtccctacatcaaaggagagagagcaccttagtcttgtccaggcggacatccccatgtgagcagagtgcagttttgcaaacagctcactccattctgcagcggacacatggggtatttttgctcctttcttctaagaaagtttcactgtttgctttttaaaagtctacgcagctctttatgttgcactaaaccaccccttctaatgtaaatcgaggggatttctggccacacgttggcagttgctgcattttgtctttcaaagtagctcattttaagtttagatttttttttgccatttatgaagcgagtgattaaaatcctaatccatacacagctttcatgtatgtacaccgtgcgcacatttatatgtagtgatgcatacacctctctctgttttgtatgcatagggcctatacattttaaaaatgtatataaatgtgcacatgcatgtgtacattcacgcaagcatttctacagcatccgtgaggtgcctatagataaaaagacccatccagccagccacaggccagatgtttgttggacaaaacatggcagatttgtgtttctccttgctatcttctcctcccaggtgatttcctaaatttcccttttgagcttttcagtgtttttttttttttaatagaaaaatgtagtttttaatcttttggtgtttattttcttttgtcactcataaaagcattgattctcctctgaattttaatgacaaaggaagatcttctcttgcgaaactgtgtgtgtctgtgcatgcacacatgtgtctgtgtgtgtttagtttcactagcatgtccccctcttgcctatttttcttcagcaagaagaactagatatcaccttatttattcctgtcgcctttgtatttttctcgactgtgatttttttttgttctttagttgtcaaggtggccaatgtttgtttgtcttgtgtatttctgggagcttgctctcttcgtgcttttagttttttatgatccaacatatcaatatatacctttgcaggcctaatccttttgtgttttcagatcttagtgcccccaccctctgaacaggtccccccttttctttggcctgtctttttagtctctcttctgtctcctatcttctcaggccatgtttgccagctacgtccctgaaatcatagagttaataggaaaccgcaagaaatacgggggctcctatagtgcggttagtggaagaaagtaagtatgccaagaggttttgctgcctctgctgcggtagaatcctctctgcatgccatttttttttttttttggctcttgtttctttgtttcatgcatgtaggcaatgtttgcccgctacgtgcccgaaattgctgctctcatcctgagtcggaataaattcggcgggacttttaacaaacatggaggcagaaagtaagtcagttgcatcagaaaagatgtggttgagtgactttcaggagtccctgtggaggtgccatctgaattctgcccctccccaaccccaccgggtgcttctgtgagggaaggcccagtttctgcatggggtgtgatgtcagaggtgacccgaggacgttgccacgcttggaccaactcccattcacaaattccaagagatgtaatgaatttatcctgaaaggagtccatttataactgggcccatattttctcttctgacccctaacaagtaaacaaaactcgttcattcttccatcatctggctatgtgataaaattctggtccctcaaactagtatgatgccctcctatggtggtttgtgtgtagcaagaacacaggataagactctggcagagaagtccttgggtggcagatccaggtcatctggcctactgcaaaggcactgcggccactgggaacccagttctcctcttcatccaggaggcaccgatcttatcctcaaagggactcattactcagctgaaattccttccgggcaagaaatagtatatttctggtagtttagggtactacatgctattcctgccaaatcttttgtttggcttcccaaatgtgaatgctttcttctcgggaactattttagtgtgtgctcagatcactttatcactctcgatatcaatgtgcaggttcaatagagaccccaaggttttttcctaagtagagggcagtaccttacaacctcaagaggagaatgccatgggggagagggggctggcagcagccatcctttatttatttttttaaagctttttctggagtagtcacctttgtttgtttttggttttgaggtataacttacatagagttaaatgtacacatctttaacatataaagtgaggaacttgtacctatgtacacacccagtcactatcatcctaccatccggatcaggacacagaaaactttcatcactcatgcctcttcccagtcatggacgttcctatcatggaactgttttgttttgttttgttttcccttctcgttctgtttcaaatgaactcttaaagagcttcttttgtttttttaagaggaaataaaatcagactgggagcattgtatttccctccactgctgccttctctttttgacagtcagccgtgtgggacagagtggaccctcccctttggtcagtgagtccagtgcttcctgagctcaggtgtccaggcctctgcacaggaaatgaggaggtggacaaaagggctcattttcttgaactacccacaggacacccgtttcctttcaaaggcacaaaggacagtgggccagaggaggccagttggcgtcttttccgggaggcagcacatccctccatcttccctctaatggagccctcccctcaatattatcttaacagccctggatgaggttagaaccaagctgttctgatttctgggccattggttggatccaaaaggccaagtaagtccaaagattcccagtggtcatgtatcccatgccaagaggaaaacagcatctcaattcattttgccttgaaggtgtggacaggtctccataaagcagaaggcattctgagggcctggggctctctttatggcctccctatcttctgacgtctccgccagcatttcccaatcactgccccaagaagtcaataaaatcaattgccctgaaggctaagttgaaaatatttcttgactttcattccaggtgattttttttttttaatgaaataattttcctagtcaaatgtgggtgagctggtgggtgggctggaggccggcagctttcggtgccagctgacccagatggggctctcagcccggcactcactcactgcccccagtccgatccggtcatctttcaccctggcagttccactcaaactttcaggtgctgatgacttcagatcacagacttcctgccactctgttctggctctgtaatcttttatcaccgcttttagcctggttttctctctctctctctctttctcttttttttcttctccgtttatgaaaatgcactttgcttttaatgttctttttgggtccccactgttcctgaccctgcagacacagagtccgtcctgtcatcagcaccgggcctgttcactactttatgcattgtttcctggttcaaaagctaattactaagtagtttaaagaaggcctttggtcacttagatctttcatcagaaaatataagcttgggaaaggcacggtaataaagggccattagcaccctttgtttgatgttgtttttccagtcagtaaaacaagattgatgaaatgttatgtttggccaaattttgagttttcatttggaattcagtgttgagagaatgggctgtcagaatcaataagttttctttcgcttgggatatgggcatgtggtagtaattagcaatataaggtctttagttgagcaaccaagcatggattctggcagcaaacataatgagaaactacagttgttctatttctaacgtcaaaaagtttccagataaaattaaatgcatttgcaaaaggaaagcagctaaactttgttgaaagataaagttcagactcttaaaacagtgtgctgtgctctgagtttttgtgtatgcataagtccatgtgctctgcccatggacacacacatacatgttctctgctccccaggacccaatcaaataaatgcccagaaagaaattagaatgtatacatagttaagggatttgtttacttgtgcatattttattcagaaatgatttctctaacaatatattaacttgtcagagaactcaaggtaactcatgatctaaagctacagagacataaaactttgaaattcaaagattatttaaagtacaaaatttaggcagagaagatcagggttttgtttgtacaacacccaaattcaggatatttgagaatatgaagatttcattggcatttcattttcagttttaatcaatgtgtttggcataatataaacatttcaagtagcattctcaaagcctcttcaccatcaacactatttcaagggcctagagtgccttacccaacattttcatcacctcctgaaggatacccagtccctgcagtaggtatgggtaattgtgcacatgtgcgtgtgtgttggctatttcatgtatgttatgatggattggagcatctaagaataggggtttgggtgtccacaaccaagggttcagtgagtagctgaggcaggtaatctctctgagttggagggattagagctctctgggctcttgggctgataccctaaatcttattcataagggagccctcctgcagcccagcctgcctcccaaggccactgcctcctcctcctttcctttgtgtaaggtcaaagctgcttagagacagggaaggcctgagggctggtgacgctcccatggcctttgggatccccagctctctcctccctctcacagccccttgcagtttcccccagaggtctcctccctgagtgtgattcattccactcctggttagtttatgagaactgacaagatcgtggtccaaggtcacatggccaagggccatggaaaataatcagtcacagagaggaatccatctgctgtaacccccttgttagagggagtccagccgggagccacccagaccttgtgtttcccatgttgggacttgagtgactcaagtttgaggcaatcctaggcccaggtgtttgggacagagagaatgggatgggtttggattattctactgattcctggtagccaaatgctgacagggcacacgagaggggaatgagtcatgaaagactagatgtagccaaggtgggagaggaaagtgagtgtaattaacttgaaggaaggtcctcaggatgaagctgctgagccgccattctggtttggggaatagttgtcatggactaacccgtctcttgctccaattcaagaaagctgcctgtgaaacttaaatgctgtggcttctcttggaacatttgcctatagagacaggagtgccacacacttcctgaaatgagaatgtgaatcagtgcagcctaaagccccaggactgccttctctggcaatagtaatacctacaaatatttgcatatttcagaatcctcacattgatcctgtgagaaaggtattaccatcatctccatttggaatgagtgaagaaactgaggaacagggaggttaagtaacttgcctgacatcacgcagctagtaaagagttgggctggggtttgaacctggacagcctgcttccctgcgtcctgctgcctctccatgtcatctcttgagactccattctgctctaaactcagtgatctcctattgtttgtatcttcctccacctttccgtataaggggagccagagtaccgtgctcatgatggagaggaagagaaaggcatgagcttcactttggggctgtctcctctcccctcctgcccacccactacccctaagggtcctggccccaggattgaggggaaaaagatggagaggggacaaaaccattccttcctttatttttcccatttggttagactagaattctaattccctcttgaacacttctagcaatgaaaggctctcaaggacagacagatgaaccacacctaaagtgagaattgtgccttttttgtggatttcaacattttcttccccttcctggctccatcctttaaaggtagttccatggagaattgtagtgatctgctaaacttggacttccctgctgggcagatctcacctgcagagccttctatacccttgcagatggaaccacctgttccctttcactccttagttagtctgccgcacagcacagagcagtatctggaggtggtttcttccttatcagtgaaaggcacagtagagccccacgtgaccagttctgcagggtgcattctgtgtgtttgtttcatagctttgacttggaatattcaccctcaggagcctgtatcccgctggagggagttagggctgtctgccttcaacctcggatgtggtctccacattggaaagagccttacattcagagagatggggacagtttgtcatgcttttctatttaaatatgaaactagagtacttaattatcttctttattgtaaatgctcatattttaaagaggattccatactttagaagaaataattgagtattcaatagttgagaacaaaattcaagaactaaaaacagcccagcacagttagtgacctgcctcactgtccattcctgtggcccctctccatcggttcattcactcactcggcaggcaggcattctctgtgttatgcatcaggcatgatgctgggttttgttgggtgctcagggttcattggcgaacaaactaccctcggaacctgtcctcctggagtttacagtctcaaggaggttgcaagcactgagcaagggtacaactaaagcaaatgccaattacacatttttaatgtgtgctgcaaaaccagaaaagactaagattctgcaactgagaaaaacagggattagttacactggataaagtagtccaaggaagcgacacctcagaggaggagatgctaactaacgcttgttcaatgaccttgacccagcttgcattacccactaagctgggggagctaacactcttgcttttaaaatccaggttatgcaagccccacttgcaaacataggtcttcagttctacctccactagaggaagtcttaaaaactgattgctcgctcagaccccaacctgcctgagcagtgcttgcttgacttatcgggagatggcatcctgcgtatcttccctgcttcctgattattgggttatttttaaactctgtgtctttccttatatcagaatttggactctccttctcactcagaacctttgttccttcctgagagcgcacactattccctcctgcctggctgtcttgtatcaacgtggaattccactccatttcctccaccacactcatgtcttgtccaccagggttctagactgatttctaaaggatttggaattttaaattgtctagtgtgccagagcatggatcatttatttacaaagactcatttaatctatggccccatagcctaccctaccttaaaggaattaacacgagtcatgccttcatgtccatccattccacatgtgtttactgagggcttgctaccaggcactggggacagatgcatttctacacatccataaaaatctccaactataccacagcttttctgagctacacatcgtactatttggccacctaagtggttgggaagtccaatatcagggcttattgaaacctcttctcttggttctgagagagtcttgctacaacaccatttccctctcgactctttctgggaaggcatggcctctagcacttgggaatcggatttgagatgatttcatgttatactgacttgggccgatccacaggccttttctttccatgtttacttgtgtcttgggcaacagctattctcacttttcctcgcctgcaaggggcggactgctctcatgaggggtgtttcctataaaatgtcatttacgatttctctattgcagacatggctctggtcgaaatgtgactgaagctttgcatcctacacagacttagatccctcatcaagtagccattcagccctcattgcatgagccacgtgacttccccagcctgaacccctcagcaatgtctttggattcctagattttaaaagccataaattagcaaatcatcaacatatcaccaggaaggatcatctggtagcgattctagtcagaaggaaacacaggccccaataaccgatctttataaagatatgaagaactgtagacagacagatacagtaaataagaagacaaatagataattcaagttgacagaacatcttggactgattaggcattctgctttgattagcattaaacttcttgggaacagggaaaacaaaaaatgagcttgccctaatactttggaaaaatgacctcttgactacttctgaaacgtggtgctgaggggtagatacccaaagcgcttgtcattagatgccatgtcttctgatgtgatgtgctaggtatcccttcctgatgagaggggtcttggtgggcgtgggacatgggcacttctttcttggcatctgttttggattcctctaagccatatcttcagtccctttcaaacttgaagctctatttaaagagacttggaagcatattaaatcaatttcctgataatactgatagaatgaagctcccctcctttcctgctgtcactcttcccttccacacacttagcaaaatgttccagctattgttctgaaaacaagaatagaaatgtaggtgggagatgaactgtgtaccttaaaaaaaaagtcgtattcaagcctagattttcactctcaaatattctttcttccattaaaaaataattcgaatatgatttctcaaattataattgctgaagattctgatcaatggctcctttgattgggtgaatccttgccgggtagattcagaatctcaggaacaattgcagccatccagactaggttgccccctgttttctgtcttcgtaccatgtcattcactctgctggacttctttccagagctgtgcaaaatggttcctggtagctttggggttccttccatgctgctgtcatcatactatgaaactaaaccaggaaactttctaactggccaagtccagtgtctctttttattaaaacattatagaggtcaatacattgtgagagttgtggaaatctgattctcttgtcccaagggttccagtctccacagccagtactggtgttgcatcacaatggcctgctgtcacccccagaaccacagggactgttccaaatatgggtaccagttgctggaaaagtaatctatctcccctccttgtacctttctaacaagaggacatgggggcagttcagagatagatatgtgcccatctcagtgggagcttatatgaccttagccattgactccaaaggcaaatgtcagctagtgtatagaacagccttaggaaaactcccattctaacatattggctcaacaaacaataatttgaatccccaccatgtgctgtgggtaaaatgtggttcttgctctcctggagcttatctgagattctgaccaatcagtaccacccaaggaaacagtggcagtgaaacagaagcttgagtatgcaggagcgtcttcccagtgaaatgctcttttttcaggaattttattcattgaaatcatggaagtgtacaataatcatgaaagcaagagacattagagggaagcctcccaaaagcatttgataattcacgttgttgaacatacccattgaacagtggagagcataggtaatagcagattgccttgttcacctaaaagcttacagacccagtaaaagaggggtgcagaaagatttgggagggttgggaatccgctgatgtgatcctgaggtccactcctttccagaccccacaaaggtcctgctgtggcctgtcatgcctcgtatcatgccttctttttacttttttccttttctttttttttttttttgagatggagttttgctcttgttgcccaggctggagtgcaatggcgcaatcttggctcaccacaacctccacctcccagattcaagcaattctcctgcctcagcccctcgagtagctgggattacaggcgtacgccaccatgcccagctaattttgtatttttagtagagacggggtttctctatgttggtcaggctggtctcgaactcctgaccgcaggtgatccgccagccttctaacctgtagctccttccagtccctgtgtgactaacagatgctggaggtctgctggggcctatgcaagtatgttgagtctacagagtgaatggctagcagcttatgctagctgtggcaacaccgttgggtgtggctggagaacaaggcaaagatatgtcaagttggttgtcattatgggagggtcagtcccaacagtatgtgctcaaggaccatgatacatgattcaccaggggtgttagggagggaggtggggctcgctttgtaaatcaaaaccctctcctgggcaaaattcagagccatttctttgcttggactcattctccctctattccaccttcatccctgaagagtgaggctgacctttgcctgccttagtcttctctcagtctctgcttgtacagaagcagcattaaaaatgaaatcgggcaaatctgctttgatctgaaaaaaggaaagtgccattcagctccctgatttctctgtaagagcagagaaccatctagcattgggagattcaggtcaagggaagacttgcttattttaaaatggccaaaggccaccaagcccaaagtaatgggatgaataagatgcagaggggtgagggtgttggggagggaggcataggaggaatcagtgcagtttgtgagggttcagcaactgtggaattgcttactgaagaaagctgcagaattccccttccagagaggaaggaaggaaagaaaggaaaggagagagaaagaaacctaaatggtggtaatacttgcatactaggtaacagtgagaattaggtgagaaaccaaagtaaaggtaaacaagtctaccagttaggattctctggttgcaggcaacagaaacttatttttttgctgacttaagaagaaaagttttttgttttttttttttaaaggttagggtaccttagagattccaatgaaaaactgaagagcaagatcccagaaaggacagaaaagaaccagagatgcagctctgacactgaggaagtggaaactcgggagtagtcattacagggttttgtcatcaggttgaatcaactcccactgtgattagcatcagcccatccaagatttaagagtacccattggcctcacttgggcagaaaaccttcactaaaggtcccaagactgtatataattgggagactgtatttaatttggggaggagcaattccccaaattaaaatgaggtgctgtccacagaagagagggtgtatgcaggacaggcaaaatctaccaatgtccccggcactgagtttctcagaatttaaagacttggactgaggctccatgtaggctacaagctacaaaatatgtgtgatcatttctcaccacggtctaattatggaggtctaactgtgatttgggatggtggaggtgtagacacagatccctctagggtagctgaggttctgactgtctgcatgcgataagatgcaaagttttggcccaggtgggacatcccggtattccccactggggctgccagttgtctgtcctctgaccttggggctctgctttagaggtgcctttgctgcactgttgggatctatttgctcagacttctgccccatttagggaaacagcagcacagcctgccacatccagaacagctccattgacagctggagaagaagattactttattcacttcctcactaggagggagaatgcatttccttcctttgtgattagcaaagtactagatgtgtccatggataggaaattatcttattgctgaacctccttttttttaaaaaaattattttaacaggaaatggtgatagtcagggtttggggttgtgggactgatacacactctcatttgctttgtttttatttttctttatgtgtacagatcccttacaaacttgaaatatgctagtagattcagggtggtggaataagcctatggtctaaaaggcttgcagtgaactacctgttaacttttttctgcacttaccatgggatagagtctccaagatgcatactttgtcaaccaatccatcagttaacaaatagttcctgaaagcccagcaagttttgggggttccaagccaggtcctggggtagggtggagggatgaggcagcacagcctggagttaggcttcatttgcccatgatgtctcccctatctttactgaagtcagtctctttgagacattcagtaaaggaggaagtgggaaggtgggagttggattagtcttattttttggcagtgggggattgagcctcaagggaagcgctgggaaacagtaaccctgaaggacatgccccaaatcagggaaacctgcattaagactaagtagccaagaaaagcactaccaggtgagaaggaaaggaaaggccagcttgcaggagtgtcatggagaggtggtgatgcagacaccaagggttcaaggtcaacctaggggggcaaacgtgaagctttggtgctgaccactgtgtggtttaggtcgttgggtctctaaccccccacgccctgcttcctgtatgatacagtgctgctggttctcttgagaagtacttcttaaaattcattcccatcatgtcaggggctaccaatggtgagatgcattttgggaggagcaggacgaggaaaacacaattagaaggctcagcagaaagacagagagtctagcatatgtatttgatataaatattatagttttacagagacatctagatcaatatgtgccacatttcatctacctctttgacaaagtgagcacaatgtattcaggcaaagctgtataggattttcaatttactctgtctgatttattgtgacaagatagctctgggttttttaagttctttatactcgttccagtaaaaatggatatagtatctttaaaaataaacagcccagagctgtgcattttacattgtcttcctagagcgaggctctgctaaagaaagatctaaggcctccccgccctcgcagaacctgatcgcagtaggatttgctgccatcccttctctttggcttttttgagggagtgtgggaatggttgggggcagtggggacagtaaatagggaaatcagttaggaagcgattgcagatgtctagataaggtatgatggaggtgtgaactaaggtcggacagagaactggagccctgtgtgaggattcatcagtgtctggtgggtgcagcccagtcagcctgggcctcttcattttagtgactggccccaggtcactgagaactcgccccccagtctcccaattcccagcttaggttatcctccctggcaccagctgctttctttcatcagaaggcatgaaactgagggaggtgttgtgctctggatctggcactcatcttgcaacctgtttccacatcaaagagaagaaaggtgctagattaaacaattgccaagggctattcattcagatgctgagataaacttaagaacgtgggagggggcccaatggtgactattccatggtcacagtttcccttttcaaaggctactggctctaacaaccagtatctgaggcttgggaaaagtatgtagattttccttgtcatagacctaaaagtcatcttcagtggctctcttgatgcctcagtcactgccctcctgtcctcttctgccttctgccttaagtcacttcccctaggttgtcctgtgtacctgtggaattgagctctgaaactgaagttctggctcaacttgggcatgcaggctttcctggcccatcactgagaagagagtagaaggattgagaagaatttgtgggatttcattctggaggcagcgatgcttaaatggcaggagaagcacacccatgtatatttagtgaagatatgcacatgaaataagcaactggcgaatttatggtgaccctcaatagtgttcataatcatcaaacttcttctcatgaagtcattcttacccctccaatgccgtgacccaccgcactgcccttttcagttaaaccagcccatatttatggagccctgacccagcaccaggcactacttgctcacactggatgaataattcctctccagaaagtgccgttggatactattttggcattgaagatgcttccttgtgtttctgaggtggatcttttattctaagccatgacctgtcagcttatatctattttatgttacctttgcccaagaaatatttgtttacagatccagacctagcatttaaaaccaaaaacttcatcagatcagaaatggttattgattgaggactattggtcatcttcacaaattgagtggtcaggccctatagaaattggtcaggacaatcgctgatggtctaagaaagttcagatccacatccacagatggggagagatttagctactctcatagctgaactttcctaaatattccccattgtaaatggatcattaagattcttattatcttctagattccaggctggtgaggaagtcctgagctgtacatgacatgtctaaaatagacatttggggtagggcgcggtggctcatgcctgtaatctcagcactttgggggccaaggtgagcagatcacttgaggttgggagttcatgaccagcctgggcaacatagcaagaacctatctctacaaaaaccaaaagaaaattagccagctgtggtggcatgcctatagtcccagctacccaggaagttaagacaggaggatcgcttcagcctgggagttcaaggctgcaattacctctgattgagccactgtactccagcctgggcaacagagcaataccctgtctctaaaaaataaataaaatataatataaaataaaatggacatttgcatcactttgcagccccttagcttgctccaatcatatggcttcagttaagtttggcttagagttcctgaccggtggaacttatgatttctgcctgtaatcagactttgctaagactatcatgatactgcctatccagccagactctagtgatcttgcaaaactgtgatggtttatccactccagttcccagactaaacctctcccttggccagtggaggacccctccaacaccccctccaccatgtatccaggaggacctctgtgggtccatttctgcttgccctgaaggagcagaagctgagatatacaagcctctttcctttccaccaccaccttcatcttagtgggaactgaagtgggagacccagattgcatcctgggcaagtcacttttacttgctgtgggatgccaggcatatatgacttaaggaaagagtttcagagaggttacctgaaaagactcaggcagtgagaacacagggttgttgaaggattaggtgggattgcataggccacagaatactttatattggttacatcctaatttacagataccatatggcacttaccatttcatagtgcttaccatggagcagattacttggcccttccatgtatcatctccttagatatcaggataacttcatgaatcaggcaccagctctggcccctcaaaggctctggctttttaattgtaaaatgcaaaattggtacattgtccaagactatttagttatttagtgtctgagctgagttaacacagggctatcagagtatgaatctcacatggtagatatgtaggcatcatggaacccaacagagataactttggatggggatcttttttggcattcttcaaatcatgccctgtgaacaaccattactctgcctccaatgaggtcacaccctgctgtctatcttaacatatttgtgttgatatctctaataattgaggatgcaataaattctagttctcttcttcctgcaataatatccttccccaaactatggccctagaatcttcaaaagtcttgaaaatatttctggtaaataaatgttccccattcaccatccatccctcatgctcttgcagggccctcctcagacacaggctggcggaagcagatctcctaataccgattgctgagttagaggcagcttctccccatccatcaattctaactgcattcaaacattttcaatatgtgggctccttgataactttcactgtatggaaaacaaaatggagggaaatgattattggcacaaaagggggaggccataaatcttcaaatcagatataggacagattggaacaatatgggttctccaaggttgccatgataatgtacctaataactctccttgggcaaaaaggcaatctgctttcaatcaatctcgctttttttctgagcaaaaataccaattacgttgaaggaaggttttttttcttccttttttgataaagacagctctccaccccagaaatcatgctgtggctaaaagatatatattttcaattgtctagaatggtattggatagctagcaccaaatgaaaaaagtcaatcctttttttctcctcactcttgccagcatttgtctacttcttaagagaagtgaaagttaattaaaggcttaagggataatattgattgcattggaatatattttatatgtacccagtacattttcaaggaagagaaccctgactttttctaaggctgaataaatcagccagctgagcttttgattcaagggtgagaggggggaactcatcttttccccttgcacttctcacacatctttcctagggatgaatgatttcagagaggaggaggagatgctggctgatgttcattcagttctttgcatgctgggtaggaagaacgaatgttcaggcatttccccagacctatcattgatttgagcctagctttgagtaataaccaggcttatgctggtatagaacttcgaactttacaatgcctggcacaggaggccggctgggtggtattaacctctcagcttcctcctgcactgaatgggaataaatactttgcccacacccttggtcgcagagcagggaatcacatctggcttactttcacatctaagtgatgagaacagcctcagccacgtatctgtcctgtggagatacccacgcattggattcatgttggctttgctcctaatcttggaagtctatgtgcagaggatgttagaatggcaaagtagccctattgtcagttgcaaggaagttaggtcagtaggggaattctgtttctcattcacttcaaacatatttggcaaattcaaagtctgaaatcttattcagaacgtgcaaatttatttgaagtattttgtccatgtaaatgtacatgtgccacaagaaacattttaaaatatatgataaaatgcatatcatccaaatgttcaatctatattgtgtattctgatacactgtgtgtcacactgtcttagcctcatactactcaccatatactaatgagggggttagtcatatgggctttgggcataaaatttgggtgggtggctaagggaccttcatcaacctagcaggagagcaaagtgatcatgttaagacatctcttctgaagtagctcattgacactcttccctcaccttggtggccgctgcgtgcctgattgctaagtgcaccaccgtaacaataacagtctataatggtgatattattaactgcatcgtgcatattattgatttactctttgttctgcatcattatcctttcaccaatgagtttactgcattattctcacatacttagtcaagcaccaaattacaacgaaagggcaggctcttataatggcatctaatggaacattgcataagccatcatcactgcctcctattatgagccacctccagccaatgagctttctgccttagtggaatgtgcacagagcaattatgaagtgcaagggacatggccattctaaattttacccaggaaattaccatgctgcatgttcaccacctgcccaagtctcagagcgcagctagagactcagatgctgtcactatgagcctggggggcacagggacaggagtcgagcctcttgctacatacagtctcttcactagaagccagtggttttatctccacagtcagtccctggctttttgtcttgtggctgactcttgcatcaaatgctcactcctgactgggcattatgtggcacatataagtggccatgacattgcctggtgccaaagtcagattggccaggagccccgagcggttggagggactgtcagtctcaacagttgtggggctcatctcttccgggtgagccactacttccagaaacagaagtccaaaccaccctcaaacaaggcgagcaattccagcctcatcccttcccagcatctccccatcttgaggtaaattcctttagctctcctggaaatcccgggcaccctaaggaagcagccctctggggacgcacagccagctggcatgatcttccattccataggcatcccagccccatttagccctgagtaatgctcacttactgtaaagtgttacatgcccccattgtcggaggagttatagtggaaaaatgcaaaatttcctttttactgcttatggccagcagaacctataacgtgtcaggccgcacattagccaccctgataaaagtctgctttcttacacacaaaatcatcgtttcagcaagatttgttatctcattacctgataagctctatgtcataaaccaagactcatacagtaaatctccccggaggacgctttgtgggcagaaagggagagatatgaatctgcaagggacttgataatgcagcatttaagcacaagcataatgtcacttattgttaaatgcataaaaccacttggccaaacagttgggcttttaataggattttgtgcagcatcaggtgagaagccatatggcttttctgtctaggagtctcagcacctgctagcaccgctgctttgcctcactgccctctggggatgggagctgggcttttatggaggcggagggaggagatgaatgcttcccctgcagctgcctggcttctgctgtcttgccagggggtgggatgcagggtcctgtcgtggtgcctggcctgatctaactggcctctcctgttcaggcacattgtggtctgcggacacatcactctggagagtgtttccaacttcctgaaggactttctgcacaaggaccgggatgacgtcaatgtggagatcgtttttcttcacaagtaagagcttcctactgctgtcagaccctctgcccaaccacacaccctgcgagggactccctgaatgtctgtaagagtggaggtcttggggaatggcactggggatggggccagagttgggtaagccatgatcccttttggcctcgttggagaagatattgcagaaccaatggaaagggaagcaacacactggttcaatgatgagagcagagtctgcctctgtggaggcgattctgggaccacatccgagtttatctctggaagaaataatagtggagctcattgtgggtccaagtcatcatcattgtccccttagcaatctggcgtgtccacattatctgctgtgggatgattagctgtatggtgtggatacgttaggagttctggagtcagttggtgaccaagcaagacaccaacttaagaggaagcaggacagaaggtaatagtaataacaactgccgttcctaggaacccccagcatgggaccctagcccgtcactgtgcatgcaggctcccatttactccacaaacagagtaaaaatacatattctggactcagattccctgatctgaatcctgactcaaccaactactggctgagcaagttacttaagctccctgtgcctcagcttcctcatccataaatcatggagatgatagtagttcctacctagttgggctgtgatgagaatgaaatgaattaatccatatgaagtgtgcagagcagagtcaggcgtgcagtaagtcttcaataagtgttagctatcagcctgaaaaataacatatatttggttgtataatccacttaggaggtaggtcttatcttgtatgttttacaggggaggaaagcaaggtatctcccttctacccaatgttgaggttttcaactttgactaatcctctttttagataaaaggtagtctgccccaggaatggagagaattagggggctccattatggtgacatgtgtggtaccatggtcatcttcttttatggagatggggctgtcatggggccagtcctggcaccacatcgcaaagtccaggacaaagctaacatgtttgtgctggcttgacgtgctgttgactacccagcacgcggtcctactctgaggttccactgaggtcggcttccctacaaactccctgtttggtggatcgtcgtcctctggcatttgctcacagaatgctagacttctgacttgtcaccatgttggggcaccaacatttctcttttctgcactgatttctccaaactttgaaaaaacagaccaggctatgttagcacaggagcaggtacccacaggttccattcagtgcttagccactgattacctgctgtgtggcccatcctctactgagcgttttggaaagttctctagaggtatagtgtgtaggctgtgcccccacatgagttgggcatttcaagatgaacacacatgcaaccattagagacaacatcaaccctgtgttatccaagggatgctgaagtcattttgatcaggtggcagaagtgactggggacatctctttcaaggagcatcagtctatggtattacccgggcaggcttctgaatgaggtatgacttgtcatgggtctgaaagactggtcagattcacagaggcagccacttttctctcatccactgctttagtttgaataaacaagctggtaaggtgtggttgctcatgcttgtaatcccagcactttgggaggccaaggtgggaagatcacttgagctcaggagttcaagaccagcttgggcaacacagtgagaccccatctatacaaaaatagaaagattagccaggcataggggcacgtgcctgtagccctcgctactctggaggctgtggtgggaggatgacttgatcctgagaggcagaggttgcagtgagtcaagatggcaccactgcactccagtccctgtctccaaaaaacaaaacaaaacaaaacaaaacaaaacaaaaactggctgctcatgcttccattgctaggattcacctttgtatccctaacatccatcaatgtcatacttatagtagatggcccagttaattaacctcttgaagctctgggttaataacatacctgcctatagggttgttttgagatttaaatgaattaatgctcatcatggccaggcatggtggctcatgcctgtaatcccagcactttgggagggcaaggtgggtggctcacttgaggccaggagttcaagaccagcctggccaatgtggcaaaaccctgtgtctactgaaaacacaaaaattagccgggcatggtggcacatgcctataatcccagctactctgaaggctgaggcacaaaaatcacttgaacctgggaagttgcagtgagcagagatcctgccactgcactgcagtctgtgtgacagagataaactctaagtaaaataaaataaaataaataaatattatttattttacttatttatttataatactattttactattatttatttaaaatgttatctgccatatagtaaatgttacaaaacatgaactattattattattgtcattatggacttcacaaatgttaggcaagtgttgacttatcacggtacctggcgtatagtaggttctaactaaatatcatctcccagtgcctagcacggtaccttatcgacagtctttttcatctctgcagaattaacaaatgaataaataggtcacttgtttaatccttgtcctccaaagagaaagatgtcagtacagatcagcaccaagaaatgtgatgagtcgcatacatgtgtgtgaatcaagaacaataatgagagtaaattaagtctgtctgtggctcctcagagtgatactttttgatccaggccttgggggatgagaagtccatgagacacagaagcagagataaggttcatgatggagggaacagcaggatgcctctcccaggggaaccttcggctaatccttgattgtattagtcagggctctccagtgaaacagagtcaataggaaatatatatatcaatatatctaatacagatatatatcggtatctatatattgatacatctatctatctatctatctctagagagatttattaggaagaattggctcatttgattacagaggctgggaagtcccactgcctgccaccagcaagctggagacccaggaaagctggtggtgtttgagtctgagggccagagagtcatagagccaatgtcaaccccagtccaaggataggagaatgacaagagatgcccagttcaagccggcaggaaagaagcaaaagggacaaacgcctctgtcctctgttttattgttctcttcagaccctcaaaggactggatgatgcccactcccacaaaggagggtagtctactgaattcactgattcaaatgccattctcatccagagactctcccagacacacccagaaatcacactggatctgggcaccctctggcacagtccgcataaaatgaaccatcccactagtggcgcagcccagcttccatatttataagataggaattccattcataccgaagagaagacatttgtcctgaggtcttggccttcctaaagcccatgaacctctttcttttaccatggtactggtttggttttcagttgggctggggttttacttctcttgagtgtgagtcttttatttatggcaagcaaaagggtgactgtaggtcacagcctctccccagggctccctgtggaaattagagaggaaggagcccatggaggctgaaacccccgagtccattaaattaatagcgatttcttctctccctgtgtagcatctcccccaacctggagcttgaagctctgttcaaacgacattttactcaggtggaattttatcagggttccgtcctcaatccacatgatcttgcaagagtcaaggtaaggaggaagaggtgacttctgcttttattccatcttggtgtgggtctggggggagtcctgactctgtgctgaggggacacacctcctaggttggccacgagtcatctcctaaacacctaatgagatcaatcacataccagcaaccttgaggtcacccttccactggtcccaggacctccttctgctggcatatgcaacactacctataaccatcccacacttggactggtcataacatgaaacttgctttgctggattcctcaaaatcagctactcatcaaggaagtagaccagttatatggacccagtagctttatacaacataataatcaagtaattcctatattgaacacttaagttggactcaatatagctctgacttctattatttacatctgaaagaaacattaggctaaaatataaaataaaattttactaagcgataaaacatttgagctttcttttttccccatctaagacgcagggtgtaaaactaaacatgcagttatctgatatcattgataatgggcgaatctttttttccagaaactggtaatttagaatcttctcataaagcacacctgaggcttagaagggaaaggtacaaggcaaaatggcatctgctactttacctatgtaatatagattttgtaagcatgttcaatatttgcatgccagggggtgtacattaatataatgaattcactgaagtctaaatgctaactgtggtcaccgcataattttgtaaataatataattggccaagatgaataatccaaaaggatttggataaattctttctttatattattaaagaaatcagagatgatttgtgacataccacggaggatattatggcctccctcaaaatccaggaatgatctattaagtataacataccaagtaggacagattgcagacctgagccagcataagaattcttatgctcatagagtccagttaatcttgatattatccagacataactcaagttattgcttatgtaaaatcttatgagaacgtagggacaattgttattgttcgtggacctaatttaaatgcaagcaatcattagcacatcaaactcatggtcccctctaaggaataaacccctgtgggctcgtgtttggataagtcagtaggtatattttgagttcaactgtaacacattatttcatacatagatttgttgtcttctgaatatctgaatactaatcggatactaagcaatatggtgatgttatctgatttagagctctgatctcttcccagcctatagaaaatgaagatgtgaaaaaggtcagatgaaggacttcagagtgtacatttctgaatccccaatactcagttaccttgctaactggagagaagggatttaacccacccacctccaactcctgataggaagaattaggatgatggtgcagatggttgagaaaggaggtggggaggagactgaaaggcttaattaattgttatttaaagaaatctggaaatcctacaagtaagcaacgatgccaaatgaaaagtataattaccaaggtacatgttgtaccctccaacagcaacaagatgaaatgtttataccataacaagaacttggaacctacacttttgacaaaaactataatctctcaggctctcaggattgttttttttttttctttgcaaagcttccccaagaagctgtcaacagagagagactacactcgagcatggctatttatatgtttgtgttctgtgaattttcctttcggtgtcttagatagagtcagcagatgcatgcctgatccttgccaacaagtactgcgctgacccggatgcggaggatgcctcgaatatcatgaggtaactcttggggcgctgcggaaggccctgggcttggcagtctgtggctgttcacggcccttttggatcttctgcagaggactatctctatgaggcctttttgccccacaagccactgtacaactcaccagctgcataggcctgggggagccgaggctgtctgtgtgggttggggcagtggcacacagggtgtcaccaaccggaagctcaccctcagcaggtggcagctctagggcttacagctggccttgggtttgagattccttgagacagaactaggaaatagattgagatgggtgctggcctgaattaaagtaccatgttccctaaaggaaatgggcctgagatatcttaactaaaggcagatgcccccaggggacattttgcaatgtctggagatgtttttggttgtcacaactaggggaccgtgctgctggcatctgataggtagagcccagggacactgcgaacgaccctgcaatgcacaggtcagcccccaaaacagagaattgtctggcccagaatgttaatggtgtcgaggctgagaaaacccttactagggctttccaagtgtgtctacggcatattgattcctatcaccccaaaggggaatttagtgaccagttaggctgtttcatccagtttcccaaaattaatgttctttcttgaaaggcttttcagtgcttttaatactaatatgcatctctgagataacgtactatagaacactttccaaacctatttgactataagcctctgctcctctcccacctcccccaacccccccccgttttttttcatagagacagagtctcgcactatcgcccaggctggagtgcagggactcaatcatagctcactataaccttgaactcctgagcccaaacgatcctctcacctcagcctcccaagtagccgaggctataggaatgtgccaccacacatggccaatttttagatttttttttttagtagggacagggtcttgctatgttgcccaggctgatctcaacgaactcctaacctcaagtgatcctcccacctgggcatcccaaaactctggattacaggagtgtgccgctgtggccctgccctgccctgccctgccctcccttttttttttttttttttttttacagaacatctaggggaggtcatactgggaaacactgtgcagtgctttttgtgcacaagggttaggcctgtcaactgctaatattggccccaacaccagcaccttattcttttcttaattcagaaaaaaagcaattgttcagtttttgttccttgcataaacccagtagtcacattgtgtgacaatgaaatgactaaaaagtcaaggtattttgctccaggtagttagaggccctttggaatttgtcttttctgtagcataaattgcagaagagttaagagggctgagaggaaatgataaagggaagcttctggagagttgagctaaattcagtgggatttccgtcccactgcattcccaggaacttttacctaactgtgaacagccatctttcgggccgaaggttccccctctaccggtggcttggtttactgcctcctgggaacttacctgaggttgaaggtcaagaagttacctttacatcctgacaatgtttgcattgcctttgtctttgctttccatcagtggccccaagtgaccggagcttccccatcagtgaggtgggggaattcctccagtgcatttcagaggagccagtcctcccttaagcatctggtccttgtgtctggcaggcaacatctggcaccatcttctcttgccactcagttttctttggcaatatgcttagtgaggtcattttaaggaagtggatgcgtgaactcttctaagctttgggcttgccaggctgcagagagagggtggaacagattctggcttcacacctgggctcattcccgaatcagttacagctgcacagtggctacaccaggatcagggttgggtgtgtcacttgttcctttctttgaagtaggaaggattttcaacttttgacacctttttctgtcattggaaatgatttaaaaaaaaaaatgtaaccctttaaggaacctggcttcactgtcttcaaaattccaaatggaaaaccaaaagaagatgaagcttaatgttttgactccacagagatgtttggggctacctgagtaatagttttgaaatgggtgtttctcttaattgtagtattttatttaaaccctaactgtggtagggttaatatgaagacacataggtactagggtgactggcaggacaaggaggcatagaaattactggtcaagggcggggctcagtggcttacacctgtaatcccagaactttgggaggccaaggtgggcagatcacgaggtcaggagttcaagaccagcctgaccaacatggtgaaaccccgtatctactaaaaatacaaaacttagctgggtgtggtggtgtgtgcctgtaatcccagttactcaggaggttgaggcaggggaatcgcttgaacccaggaggcggaggttgcagtgagccaagatcgcgccactgcactacagcctgggcaacagagccagcgaggctccgtcttaaaaaaaaaaaaaaaaaaaaaaaaaaaaaaaaaaagaaaagaaaaaaagaaattactggtcaaaggtagtatcagaaatgtaattaagtagagccagaactgaggccttggctgcaaaaagaagtgggaagttcagggttaaaaatgggctttgtctttctcttatttgtataatcctccttcctcctcagtttaatgagaccaatctgcctcctttgaaattaaaatgtcaaagatccatttgaaatgagctaatgcagaaaactggctgaagctgtgaactgcaaggcagggctgacagaggctcaaagtccttgagttataagcgtgggccaacgcaacactttttcaaaaataaaatgaaatccttcaagtgcaaaaacgcagggtgaatttgtgctgggagaggctttagcgtgatccatttcctaaattcgtacgttgcagcttttcagataaagctgctccctggctgccttctctccatttctgcactaaaaggggtgaagtggggagcgctgctgggtgggaagtttgtgggggtggtcataataaatgcacttgcatttctgattaggcttaggaggtgggcctttctgtggaattccattctttagccttccttgtcacagaaggaaatgtacaatgtcacttctgacagacttggtaatgacaaaaaccataacttacacgtggagagaacttttaatgatttcaaagcattttcacatctggtctcccatttgctgctcataccaagcctgtgaagtaaataaagcaggtactgttgctcccagtgtccagatgaggaaacaggaacagagagcccagggttttcctaaaggtcgcgcagttcattagtacaatagctgtgactggaacccacgtgtttccattcatctgcgctctgcccctccctttagcaccataattgatgtggggaggacacgtgaggcctggggtgggtgcaggccatgcttaacattgagtttggactgagggcaggtaggagacaattttccaccagatcatgacccccgcaatgccttggcacttatttttaaccagcgtttaagtcatcattttctctattagctatggaaggctgagtccttgatctcatcctaaaagccctgcttagaaatcattttttgtgatagtggccaagcatgtgtcacaattagaaccatttgtcatcctgcttgtttgatttgtcattgttgtctcaagttgttaacttggagaattggactcagcagattgtttctgggctagtccctagggtgtgggagattgcaaacctctggaggccccatgatttgggctcgctttcgatgtctacgtaggcaataagctggcagcccctgctccaggccccctactccccagtacgcacatgcatacatcccatctccaatgcattccaaggggccctcaaatttttcatgcccaggacacagactgtggctgttttgtgattttgttttcacactagcaagagatatggtggtgggaatactgtttaacctggcccagtgtctgcaacccctcaggatagccctggctgctggtcctgatgcaggataggtgagccccaaaatggggcttagcccatgaaggtttttagcttcccccagaaaagaattcaaaggcaagctgatggtagggcagaaggaaacagctttattgaagcagtagtattacagctctgtgactgctcctgcacagcggggctacaccatagagtagcagctctgggcaggctgtcgtatttatacctacttttaattgcatgcagattaaggggcagcttatgcaaaaatttctagggaaggggtagtaacttctgggtcaccgggtcattgccatagaaaggcaagtcccatgagcccagtgcagatagaagcaagttctttgagctttctttctcactgtccacccagacacttaggcaatcatattaaagggtttcctctttcatggccttctttgttcctcatggtggcttccccaaattgtatgtagtgagagatggaactgggactggaattcatccatgcattacaacttgctttcaggaaaggacctggtatgtgcctgtaaagttatgtcactatgaacatattccaagagatagttgatttcataattggacaacgggcttgaaatatgaagcatttcaatcccctatgatctagtaatagtaatgttctagggcctagaggttatagggaacctcctgggtgttgccatggcaatggtaaactgacagggcacactgctgggcttgtccagtgaaaagttgcttctgccccatccctgtttcagctagtcttcaattttgtctggtatctgagccctgcctctggaatcaagtcctgcctcctacctcagtcccatgggtaccccatttggagacagtaaaattgatctttttgtcagacaccatgcataaggcagacctgtctcagcattggttctttctttttcagagtaatctccataaagaactaccatccgaagataagaatcatcactcaaatgctgcagtatcacaacaaggtaggagtgcgagagcccgctccaggtctgaagacccatccacaggtccagcctcttcttcctcattatacaggctcacacacacacacacacacacacacacacacacactctcacatgcccacatgtgcgcaactcaaagacctgggtaaagaggtgtgattgttaaaaatcttcctgggacatttctttctttctttctttttttttgggatggagtcttgctcttgttgcccaggctggagtgcaatggcatgatcttgactccccacaacctccacctcccaagttcaagcaattctcctgcctctgcctcttgagtagctgggattacaggcatgcgccaccatgccaggctgattttgtacttttagtagagatggggtttctgcatgttggtcaggatggtctcgaactcccaacctcaggtgatctgcccgcctcggcctcccaaagtgctgggattacaggcatgagccaccacgcctctggcccatttctttagtccaaacaacgtgtttgcatttggtcactggaaggatgctccttcatgtactgattcattcattcgggaagtgtctattggaacccgaggttcagaactattgatttactcttggatcccatccatacttaagttacaacaacttttatttgtatgtgctgcagtcatttacttattcagtaaatatttattgaatacatactgtgtgattagcactctccctgacacccacaggaatatcagtgaaggagaagccctattttgtgtcctcggggatttagcagttaaggtgtagaatgctccaggcaagtgagtgataggatttctctatctgagaccaggtgaactagtgagtgcataatgcgctctgtaagagtgtaatgtgggacacattcccagagtcgagatgagaatttgcagagttgaatcaggaaaatagtaagctatccagagattaaagagaaaggaattttccttgtgttatagcttacagtgggggattgattagaaagaagacaaaagtcagagtctatgctgtttccctgtgattacttctcagtaaaccagagtccagtgtctcattcaaaggcagtgctccttctctcagccagtcaataaacttccaaaaaaacagctttaggggagggaaggtggcacctttctccatttgatgcagtaccagttatgtccttaatgaaacctagaaaccggaggctgcccagtacctggagccaggtgtcctgtctgtacagaataactcgctgctgggttatgagtaacagcgtaccccctcttatgggccatattccctatgaaataggcagtcaggtgatgcagagaaaaaccccattctgccaaatgcaccagtgccatgccgttatttcttaattgctggcaagtgctggcccattttgctgtgtggaggcccatcagaggctgtcactgagtggagcctgctgtcagtgactggcccaccatccagaacggctgactgctgccagccactgcccagccctcggcaggtggctcccttgcagaacgtgttgttctccagccaacggatttggtggtgggcacccaaggtcacattcgcctgtttgtctctggaaaacccaaggacactgaagagataaagtgaggatattggtaatgtacgggtgtcaagctggagaagtttttgatggcagcccttgtaggtggaggtgaattttattagcaaggctgtgactagtgacagctcctgcagcaacgagctctccttctttcatttgtgatctgaaatttcatttagtgtgggagtgctttaagctgttgtttagatttttggctgaatttagattgaataggaaaattaatgttgtatgtttagaaggggttgtcagttccttttttttctctttccaatgagtgctgatgcagcatcttcaagaaattaaggaggattttagctgtggttattgtccaactcaaagcagctcagccggcctgggatccagacagtccctggtcagtaatcacatgatcatagcaacctgaatgtgtttggcaaacctctgtgttgtaattattcagaaacagtgaggaagatatcaaccaattcatgattatttgcttaaaacacattttgtttagaaccatcccaaactattcgagttttggggttgggcagaatcacttacagatccttggatgattagtcaggacacagggaatagagtgactttgacacagggcattttgttgttgttgttctttcatatctctcttctagagaaagaagaaaacgtccactcatcattgtttgtctttcattccttgtagaattgcaaatggacattcttcaccttgcttcacagttttgctgtgtttcctgagatgtttcctactctttcaatacattttcttcctcttccctttcaacattttttttctgcctttcttggcactttttgctgcactcatcctagatgcttagagatctccatgcattacaatttgctttcaggaaaggacctggtatgtgcctgtaaagtcatgtcactatgaacatattccaagagatagctgatttcataattggacaacgggcttgaaatatgaagcatttcaatcccctatgatccagtaatagtaatattctagggcctagagggatgtagggaagctgcctactttctctccatgtaaaactggccctgagtttgtcatcatcataattgtagacatgtgtgtcatattttatggttttaaaagagctttgacatccattatcttctttagtactcgttggaccatctgtgcattttagcatcccagggtaacttcagagcagggcatctaagctctgtatagacagcgcagctctgctgggcacaaatcatggccaccactctgcagccagcgagcggggagacagaagagcttactgccaccgactctttaaatggagccacagcccattgaaccaaactgtggttcccgagagtaggcattatagaagggctgatgctctccaaagtgtatcttttaatatcactagaattcttggagagaaacgctttcatgctggccatcttttaaatgctggccctgcatcttctgatttgagtgtaaatggctcaaagctcttcaaggaaagattggtttataacttcttggaaaagtatcactcctgatgatttacctctcagtggattttttatttttcccaaagactctagtgaaagaggcctttatctctggaagccaagtcccatgagcccagtgcagatagaggcaagttctttgagctttttttttccactgtccaccctgacacttgggcaattgtattaaatcgtttcctctttcatggccttctttgttcctcatagtggcttcccaaaattgtatgtagtgagagatggaactaggactgaaatccatctctcctggttttccaggacagcgtatttccagttccttctccatgagaggagggaggggtggtgaagtagcagaaatgaagggcagccaggtctgccagacctgctctttatattctccaagttagggagagaggatttgcctccagacttctgggcactaacactggcatttttcatcagactcaatttacttcaaatggaaaaggacgaagtttccagaaacaaaggatttatgttcctgggtcagtctcttctctttgtttcatgcacagagatttccctccaagcattcagcaggtcaccctcactccttccctgcgttggagaaaatataatatccaaaaaaagagggcacagaaccctgagataaggaacaaactcaacttttctatataatcacatggccaagtgtcaaggtggacagtgagaaagaaagctcaaaatatgcctacagaactcaaaccagacagggccatgggggacccaaggatgaaatgcctcagccttataccttagatagcacatgcggataggagagactttctctgaaaggttttgcttgtttgtttgaaggtgccatgaaggttcagagctgtctctttagggcttggaccaaaaaaatctcctttcacacacaatgcttgacttgttcattacttaaactgaatttctcctcattcctctcaggttctcagatgatattactgcaagtgagtatttctccagttataccaatgtgttctctacgatgcccaggaagtaaaagggaaagtggccatctgaagccactggagagtagggagaggaaggaataaagggtagggctagttgttggaattgagtctgcagtgtggggaaggtcctttgatagtttgacagcaattaccacttgctgtggcccctccatgagactatttaaccatgctctcatcagggagggcactgtcatctctccctggagtacccacttttggcttaggatgcacaagattgtcacagaagcggattttgcaagaaggaatttcataagaatagtatttttgaaagcagagtgtggaacccttggacttgctctttgttttcacaatggagtcttccatccttctagttcaactattgtatattgttctgaaagtgaagggaatgctcccttggtgctccttgtgtttgctgagatgtgcagagaaataataacttcaaagccatagaatcttggcactagcagagacttagaagggctctctgattcaacctcctagtgcagagcaaaagttctttccatagtaacttggagaaatacttactgagtcttagggacaaagacctttcattttttaaggtaaccttctccgtttggtagacaaattacatccttaggaagttcatttataaaacaagacaaaaatctgctttcttggaatatataccagtcagtcttaattctggcttctagaacaaagcaggacaaacctaatcttgtacacagcagcacctgaagtattcagatgtaaccatcctgtctctgtgaggacgagagccttcttcaggccaaatattactggctgtcttaactgttcctcaaaagatcttttccagacgctacctcctcttgtctttgtcacttttctctggaagttattcagttgatcattttccctctttaaatctgactgaaaactggatcaagtactctggaactagtctgaccaattcacaacagaatgaaatgttcatttcccttgatctggggagcacttctaaaaagtaaacactggctttctctgtaatgtcacatggctagcctaaaatttgaggttttagttacccacacacttaaatttagctttgtgtgttttgttttcttttatttctctcctgcctgctgccaagctaggtcttctcattttgaatttatatagttgattttttttagcctaaatgctgtacttgacatgaaagccttgtaaatctttttagtttggtcttttgccgatttttccaactctggagaaccttttgaactttgattctttcatccaatgtattttctatgactctctgcttcatgccacttaaaaataattggatgagcatgcctctgggttcttgtctcagggcctgacataagggttgaataggaccagtccatttgcaagagattggaaacgtcgacactgtgatttacctgatgttttaggccagtggttctcaaagtgtggcccctagatcaacagcgtcagcgtcacctccaacttgtgagaaatgccaaattctccagccttaccccagatctactgaatcagaaatgctggtggggggccagcaatctgtgttttcagaaactgtacaggtgattctgatgcccgctcctgatgcctgggagtcactgatctggagtattggaaaggcaggtaaaaaagaaactgaaaatatacaggcatttggcactcctacggtctattagaggactcaacttaatgatttagctagacatcctagtaacccaggctgttgggtctgtcacaagaggaaattccctctgggctctatttggctaaatgacaaacccaggggaggacttgggcttggtgggtgcagaagcaacagtccagagagactgaagtgtgatgagcagaagagttgcataaaacagcaaacatcagaccgcagcaagggaaaagaagggcaagactggatggccctgagtggttgggcaatgctgcatttcccagaagaaatgttaaacaattgaacatttaacagagcaaggtctcatacctgcttttctttccccaggcccatctgctaaacatcccgagctggaattggaaagaaggtgatgacgcaatctgcctcgcagagttgaagttgggcttcatagcccagagctgcctggctcaaggcctctccaccatgcttgccaacctcttctccatgaggtcattcataaaggtaacgtctcgtcttattagagcacattagctcgggattccatttgtcgtggggttgagtagagagcacagcttaaactcaaaacagatcgacgggctctaaccacttgggttaaggagaaattccttgttacggatttgggcatgaagccaacttctttcaaaattatgtttttatttttatttggcacatccacggccattaaatgattgttcaaagcacaatcccctctttttttagataaaccacatgtttatctatcaacaaagcctccgctgttaaaacaaaaatatgatttatatacattccatatggcaacagagcgcctaaagaaaagaattatcattttgctcttttatatcaagtggctggtggacctctcactgtgtggataaatgcagaccatgtgtttgtgctgaagcccaaaccccaacagcataattcatttatttatttctgcacaatcaaggaggccagcaggactgacatgccgcggttgtttgaatggagagcgaaacaatgtactgagtcctcggcagcagtgccctttgcaccgagagacaggcggtctggatgtgttcatgtccttgtcagagctggctggacagacactccagagtccccaaggtggccatacctgctgcaccagtgcaggcaaggagagaaaaaaaaccgactctgtcctcccagggtgggccaggttaggattgtgtttccagagccttgcattgatcgcccagccactagcaagggggcttctggagcctgggataacagtcactccagtcctcatccttagactgttcttagattaggcagtcaaggtgacaaacccgtgtgtaaaacgggtctagcttgagcctttctgttatggcatgggaggcagttagctctggatctgggcttacatcttgcctcttactatgtaaggagcagaattaatagctggcaaggtgggaaattacatccttagaaagttcatgagtcagcacgaggtccataaaggaggctggaagctctgcaatcaaaggtatgagacctcctgccttttgctgtcatgtggctacctaattgactgccaagttccttgatggttttgaggaaatggcctaggttgcaataagagggatgggtgggaagcatgaggatacagatgcattggtgctcaccttgggcacctatgagtgatattatttagagcaggagtttttctaagtccttatccttcgtacctgccaaatcggcattatgtagccaactgatagttaacattgctccacataaaggaacaaattgctttggagctccttcaatcactttagcaacactgatagcaagggataccttgatttaaaaaatcctcctatgctcattatgcagccaaaggtctcagctcagcagaactctgagctcagatccagcttacaaataaagatgttgcattcctttaggtatcttctttaatccaggctgctctcatcctgcatgggtggaactgaatggaggtggcagggaggtctgtgtagctgtgtttagagacgagaccctgaagccagatgtagccacgtgtctcccagggatcttatgttcaacatgaaaagcccagactcaggataaaggactgtcaccacgagaacttctctggctctttcaatcaagctctggtggttttcttccagggcatggcccatgggaccaagcacatggtgtgtggagctgtgctctgcttcctcgtgttgatgtaacatgggctttggcagggccccaccacagatggggccccttgacatgcgtatgttttgattttgtggtgcctgcatggtaactagagctgtctgtcaaggaaattaataaaatggatgtgatgctgattcttcagtgctattagcagcagggaaaacctctgcccaaccttcctccagaccctgatgggcctcacctctaaagccaaggatgtccgctccagctcagctaatcccattgccaagttcctatttaggaagagcttgtgggaaaggctgggcctggccctggtgtaactgaaaacacattttcctctgggggttatgttaccacattatttctgtataaggccaattcccgcctgtttggaagtagctctctgaatatgaccttttgacactgagatggtctttgtgttggaattggctaaggtacatgacctggaaatcacaagccttcccctcatatatttttctcagctaaaatagagatgccttattcacatgctccccattctacattgctatctttgtgtacttacctccaaatcccagatcttcgtctcctttaggtcatggtgaacaccataatggcaccctccttggcatgttttatgtattatctcccattccagggatcacaaagccctcacttacttttgttgggggtggggggtaggtggaaaagtaaacctacaaatggattattgtttacagaaattgcttccttctccaatgacctccgtatcctatgacggagaattcatcaatatttccatggggacaagcaggcctattaggatggacaaagaaggggtgaggctttggcagcacttgatcctttgggaacaattagcatttctggaagccaaggtaaagtgttagctcaccctctcccttcccctaggccggtcgtgtctgttttttggtgcggcagaacccctgttaaaataagagaaacaagactgtaacagcaaagatgtggcacaggcagaagcacagtgactatccactgggctttttaattttattttaattttttgtagagaccagtctccctgtgttgtctaggttggtctcaaactcctgggttcaagcaatcctcctgcctcagcctcccaaagtgctgggattatataggtgtgagccacttccactgggcattttatcatgcatgagaccaaaatgccaagactgaaagtgggggtgatatgtttaataaaagaaagagggattactggccaggtgtgttggcccacacctgtaatataagcactttgggaggccaaggcaggtggatcacctgaggtcaggagttcgagaccagcctggccaacatggtgaaatcccttttctactaaaaatacaaaaattagctgggcctggtggcgcatgcctgtagtcccagctactcaagaagctgaagccggggaattgcttgaacccaggaggcggaggtcgcagtgagccaagatcatgccattgcactccagcctgggcaacagagaaagaagaccccgtctccaaaaaagaaagaaaaagaaagagggactactggcatacaggaattacaaaagaggcccagcctggaggtaccaagaaatatggagcaatgcttctttatctctccatcaatgccactctcaaagataccaaccttaggaccctaagtctttgtccctgaaaacctcactcctatgtggatatatctctgaattgatctaaactttttaggaatcttttttatattttatatacccccatatctttgggggtaatgaatttcttaactttgctaactactgctaaatattttttttctggctatttgtccttaatttactccatttaaacttcaaggcatgccctctacagcttctgcagtgctaggatttaacaaatcttatgctaattttatatctaatacctttaggaaagagactcaagctggcaatccagggatcctccagctcagcagctgctgttaaggacaggttaagcattttgtgcaataggatcttatttgaacccttgagttcctttaaggagttcgcacgaacatcctggtgcctgtgacttatctgcattcacatcatcagccagccctggaacatgctgttcatttgccactgtctgatctcctactcctagcctgtcaggttctagtgagactctccctgctgtcttctgtaaagacccaggcaatgaacttacttagcctatctgctattgcctcagccctgaataagtggccacacttactctctacttggcttcctcacttggatgtaatttaagatccattgatttgtttttgtttttgtttttgagtcttactatgcatacttagcttctcttcagcgtatgaggtttcaagttggggcatggcctgccatcttcatgaattgtgctatcattcttactaggattagctgtctttgcacatgacaaattgtgtgtgtgtgtgtgtgtgtgtgtgtgtgtgtgtgtgtgtgtgtgtgtttagagggtgattaactcttaaaattgtttttcaatgtacattgggacttccaatgtagcacatttaaatagttctcagaattgccaactatttgaagtctgttaatctatcattttatacacacacacacacacacacacacacacacacacaaaacctggaacacagtatgctctccatgattatttctttgttgaataaatcagttttgagaatgaagaaaatatgttatgtatttctagtgttgtttttttttccctatgccgcaagatttggaatttgcgggtgaaatgttacttaatatcgataacaatacacgcttctctgtcatgttttctgtttctgaatgagaatgcactagagaaatcagaagcatgctattcagattgtatcttggctgaagtggatatggctggacacacaaagtttttgtcctagcactaaccatagccaagggaatcatttaaatatttttagtctgggttatgtttatgtgtatatgtgtgcttgtacatatgtatgtatagaattagtctggtttagcagctaaaaatgtaaatcaaggacttttaataatagctaaaaaatactgattcccatgtgctaaatcccgtattaagtgctttagctgcaatatcacatttaattctcacaatgaccatacccaaacttgtcactattattatcctccttttacagtggcaggcactatgggttaagagaatttcaacaacctgcatgcggatgtgtgatttggaattcacaaactcaggtgttcaaacccaagcaaactggttccaggtttgcccttgagtatactgaaaggaaatgtgagaaacgataagggaaaactttagctagtgccatcatcttagcacaaatcttagctttctatagttcattctatgtgaactattgatgcaatagagatgccctggggacctaccatgttccagacagtgcgctaatcccatcagcatccttaggtctaggaagctctggtaagcttcagaaagcttctgttctgacttggatgtatgggcacatgtttgcatagctccattctgtgcatcttctttacctttctgtctgcccagctctgcaaaagcagaggccactgcatcataacagttaccctaggctgggctgagtcagggtaaggaatgaactaggctcccaagaagggattgacacacactgctgttttgaggaggtgaaactaattggagtctaaaccaagtggagctgaagggctggggatgacttaggtaggtgcttctgggacaaagtaagtatattagggttctctacagaaacagagcaatggtgtctctgtgtgtgtgtgtgcacacacatgcgtgagagagagagagagagatgttgattataaagaattggcccacagggttatagtggctgggaaatcccaagctctataaactggagacccaggaaagaagatggtatagtctctgtctgagtctgaaaatctgagaaccagcaaagtcaatggtataagtctagatctgaaggcaggaggagactgatgtcccagcttaagactgaccatcaggcagagggaggaaattctcccttactcctcctttttattctattcaggccttcagtgggttagatgaagcccacccacatgggttgggttgagggttgttgggggagcaatctgctttactcactccacaaattcaaatgttaatctcatgcagaaacaccctccaccctcaaagacacacccagaataatgtttagccaaatatctgggtacactgtgacccagtcaagttaacattaatcatcacagcaagcaattcttattgtctggtgggtgtaagctctgctaaccaggttgaaggaggcataccagaagcagaactcaaccttgcgtggcagggttggagttgacaagagctctgaaatggggccagggctgcaactgataaggctgggattgaggtggctctctacttaggaaagaacaactagtggtaccagagtagagagtttgtctggcaaagtaaacccacatggtggaaattagatagggagatgcaagatgttgcttactctattacccatggacaatgtcaccctaaccacagatggcattatgacagcagacttctgcacatattcctcaccagtggagagcagctcccaatacaattatactcacttccttgataatctcaattattctcattgcttttagatacatagatgacttccatatttatatttccatgaagaacctctcccctgaacccggcgtcaccgattcaactgctgctcaacacctacatttgaataccccatctcctctcagacttaccattccacaatcgaattccttttctttgtccacaaacctgttctttgctcattttactattggcaatgccatccttcccatggctgaaactaaaaactctggagtcacccttgactcatttttaaaaatttatttatttgccctcaaacaccacattcaatacagcaggaaatcctcttggttcaagtttcaaaatattcccagaatcggagcacttctcaccacctgcactcctactactagctccaaaccaccatcatgtctctcctagaatattacaccagcctcctaactggtctgtctgctctgcccttaccaccccacctccaatctatcttcaacaaagcatccagaacaaccttctcaagcatgaatcagatcctgtcactcttctgcataagtctctccatggggtcccatctcatctgaataaagtccctacaatggcctgcaggtcctaagcagtcaggtccctggaacctcattggcttaagtcctgagtgttctcctgcttcttatgttagccacactcccttgggctggtctagggatttttacttcttgttccctctggctggatattccttccctgagcagctgcttggctcccctctgtccaactcttgttgtctttgcttaatattaatttctcagttgagtctttcctctaaggcattagaactgcatttttaaaagggattaaaaatgaattttttattgaaatataataaaagtgtgcatgtaataaatgtacaacctgttaaatacttataccctcagtgctcatgtaaccaggacctagattaacaaagagtacattacaaatatcccagaaccccctgtttttttttaaataagtcaggtgatactacatgatcgggtctgtttctggattctcttgggagaattgacatctccacaatactgagttctccaatctatgaatatggtatatttcttataaagggatactttatgattcaacaacttccctggcaaatacaggaaaatcaggaagaaagtaactaagctcatacaagttctctggggcttgtgagggtctctagagagagtagatgtcccacttcatattctctaggaagtatacagctgttcttctcagcttcattgggggatgaagtttccatgtggaaaaaacagaattgcattttaggaatctgcaccccctccccctccacacaccatacatccacatccttatttactctcttggctttgttttttcccgtggcactctttggtgtttattgcctcttttccctgggacaaggtgagcactgtgaagatggggctacttgctgaatcctcagtgcctagaacagcgcctgactcataatagctactcaatacgtgtttgtggagtaaatgaatgcatcggttggcctcagcctagcctgaccagcctgtattacagacagctgggtgggaccaggaccagcggggacttgtaatttggtgtgattttggtgcagaaaacttctttctttgctactgtatatgattcccttgccaaattaaagagctttgattcaatgtagaaacatgaaatgcaaagctctttaatccttgacaaggattgtgcagaggctggttagatttggttataaagctcttcaactgccagaaaatccagtcagtgtgttgtttaagttcacaaatcaaaataaacacccatgaattgaaatgaatttgctaaaccccagtatcctatttgggtcaacgtcactgtgtacccgcttttcaccctacttagatcccattagatcagaggcttccatgcaggatgctgcctcccgcagtgccactcagtctgaccaagcccactaatgcccacctgaaagtagagtaacttctgtgaaaactatttctaataaagagagaagtaatccatgagctattaacagggattcatttcccctatggccctggtaatttctagaacattgaattaaagcgttctcagacctttacaaattctcaaggcaaacattattagcaaaaagaagcccatacagcatgttagaagatagattgccagaaaatgtcaacggatcttctgaataaaataaaagaagttgaaactcctttccccatcttcttcccttctccctccttcccccaacatgattagaaagtcatttcatgtgtcttatatgtttggtgaatcaaaagcaaatgtacatgattgatggtgacagggaacacatttaactcattattctttactttgcagcaaaatgatttgtgtaaactgtctgcctagcattaaaggtaaagcaaacttagaaaccccaaaatgttatattttcatctaatattttcctcttggttttatagctgtaatcacatatggattcttttatatgggtcttggcatggactgaacaaagagaaaggcagcacagaaagattacataacatatacacagagtccggtgcccagcgaggatggggcccgagaagcggcaatggtcaggacttaatgcgaaaatccagtagaagctgacactcaccctggcccttctcggctggcaggatatagtcactgatgtgaaataagagccatcttattgaacaagcctctggccaagcatcagtctgagctctttcagagataattggcctttaattaattgcatgcattcctgagtccacctgggtatccacagactgggtctactctgcctccccactcttccaaatttttgactttggttttttgagtgccatccactgttagtgattgttacatgaaaatcgcaaagtcctatgtaagccataaggaataaaatatcagatttccttaagtctattggttgtcgttgccctaaggtgattttaagtgtgaatctgtgtccagaacaatgatgaggaatttggaactttgaggcaactattctacacatctaggggtgcaaaacaaggaagcaccattgatttgataccgtgggtattctgttaagaactttggaattatagtaatactttacgtttgcacagcacttttcagtttacgtgatataccttttttttttgagacggagatttcgctgtctcacccaggctggagtgcggtggtgcagtctcggctcactgcaacctccgcccacctctcccccagcaacccagccgctgcagcccccaggttcaagtgattctgctgcctcagtctcccaagtagctgggactgcaggcacgagccaccacacccggctaatttttgtatttttagtagagacggggtttcaccatgttgcccaggctggtctcaaactcctgacctcaagtgatgtgcccacctcagcctcccaaagtgctgggattacagcatgagccaccgtgcctggctgagatatacattttcacttaaattctttatttgaccagatacacaaggaaaccagatacatatggaaaacatgccaaatgcaaagaacctaatgtctctgacctttcttcagttgtagaatagtaagccacaggacccatcaccatagctctttgggaggaggaaatcggaagatgacttctggttgcatggctggttggggaatggtagagctagggccagaacgctacaacatcattggcttctcagctcagcgctttccccactgttacacattgcttctccaagagaaatgtcttgaatgtaaacactgctttgttttatattcaaatcaatagcttctaagaatagaaaccactttgcaacatttgtaaaatgagcttatcctaggtttcccctcaaccatgaaaaactataaaaattaagctcttttccaaggtaggagatacatatgtctgccccattcccttggtggtagcttagtctggaaaagacccaggcaagtgctgtcttgtctagaccataatgccttgtagtgggaggatgtattgctcaagccaagggacgcaactgagtacagaagggagatgatgactggtttgttgagggacatgtaagaaagctataaagtttagtctcaaccatttgaaagaaggaagcagtaggttacagtgcagtatgatagacttcccatgtgtgaaatgtgtctgtaaaggggagtgagatccggacgggttaggtagtgctaataagatgaagaaagaaaagtatcttggagaaaaaaatatagttaatcctaatgtttacagacaccttctgatcataacaaaaatattcaagtaactcaagcaattcgagtggaggtgttggggctttggattgataagtcctcaaggttattagcagagtaatccatttgcattataggaaaatgctgaaggtacatgattccagtaagatttggaaatgattatagttttccagaagtgtttttcattttattttttaaattaacatacagtaaagttgattttgtgtatgtgtagtcatgcaaccaccaccacaatcaggatacaggatagtttccatacccccaaattccctcatgctgtacagtcacaccctcctgtcactcctaggccctggcaaccactgatctattctctgtcattacagttttgtcttttcaagtctgtcatgtaaaggcatcatggagcatgtaaccttttgagattggcttttttcatttagcatagttcccttgacatccatccaggttgttgcatgtatcagtattccatcctttctgttgatgaatagtatgacatcttatatgcaggtaccagtttgtttatccattcatccattggacaccatttagttttcctccagttggggcgatcatgaatacagtcgatataaacatttacatggaagtttgtgtggatataagttttaatttctctagggtaagtatctcgaattaggattgctggattatagggtaagtttatatttaactttaaaagaaactgccaaagtgttttccagaaggactgtaccatttatcattcccatcagcaagcaatgcaggagtttctgtagctccgcatccttatcatcacttggcattgtcaatactttttattttaaacagtctagtaggtgggcagtgtggtatctcattgtggttttcacgtgtatttccctactgatgttgaacaccttcccagtggttatttgtcatctgtatatgctttttggtgaagtgctgggtccattttaattgagttgtttctttgaatttgttttttactgtttaagaattctttatatattttggatctcgttggatatacaatttgtaaatatttgcccctaatctgtagcttgtgttttcattttcttaacttaaactttctttcctggaaagaagtttttaagttgaaatatttggagtttttcttaaaaggttaaacattgagttaccatatgactcagaaataccactcctagatatctacccaagataaatgaaactctatgtattagtttcctatggctactgcaataaattactacaaacctagttgctgtaaatatcacaagtttttttccttccttttctggaggccaaaacttggaaactgagtttcagtggagttagagtcaacatggtggcggggctggttccttctgggggctctagaggagaatctgtttccttgcattttctagcttctggaggctgaccacattccttggctcttgtccctgtcatcgcatcactccaacattgtgcttccattgtcacatctcctatttcttcttctttagccaaacctcctctaaaaagacaatagagattacatttagagcccacttagataaccttcctatcacaagatcgttaatcacttctgcaaaaatctacattcatcccacatgcaaaatacattcacctcattcccccatccccaaaagtctcaaccctgcaaaacaattcaagtccaaaatcagagctgaagatcagcaactcacatgtcccaatgtcatcatctaatcagttatgggtgagactttgggtgtgatcaatcctgggacaaaattcttctccatttttggatctgtgaaactagaaaacaagtactctgcaccccaaatgcaatggcaggacagccataggataatggctatagacagtgccattccaaaagggagaatatggaaggatgaaaggaggtaccggaaccaaacaacttcagattccaatatggcaaactccattgagcttcaaggtctaggaacaatcttctgttgcttaaaatgggcattacaaagtttgagtcctccaaatgtattctttttcaaaattgctttggctattctagtgtccttgtctttccatatatactttaaaatcagcttgcctatacctaaaaaaaattcctcctgtgttttgattggaattgtattaaacctatagaccaatttgggggagcactgacatctttactatgtcgtatcttccagtccatcaatttggtctcttcatttatttaggtcatctttaacttgttttacccagtgttttatagttttcagcatcaagattctgtacatgttttgttagatttatatgtaagttttacatttttggagctattataaatgacatcttaaaaaaattgggttccaattgttcattggtggtatgtagaaatatacattatgtttctgtattgaccttgtacctggcaatcatattgtaccggctagcacttcttgcagaatattgaatagagggagtgggagtagacatcttttctttgtcacctgtcttcaagggaaaacattcatttctttcaccattaagtatgatatgaactatagatgttttgtagatacctttcttttgaggttgagggagttccttcccatttctattttggtgagagttttatttttttcaatcatgaatggaggttgaattttgctaaatgctttcctgcatcaatgtataggatcatgtagtttttcttctttagactgttaatatggtaaattacattgaatgattatacaatattgaaccagccaccatacattcctgggagagaccctagttagtgtgattatttcttatacatgttggtggatttggtttgttaatatttttatgaagaatttgtgtgtgtttgttttttggtgtatattagtttgtacgtttcttagactgtctttgattttagtgtcaggtaatgttggctttataaaatgagttggaaatctttcccttccttctgttttctgggagaaattgtgtagaattggtgatttttttttctttaaatatttagtagtatttggcagtgaaatactactaggtttgggcctagatttttttcttttctgaaagtttttaaatacaaattcaatgtcttcaatggttataggactattcaggttaaatagttaatcttgggtgagttgtgacaattcaaagtttttgaaaaattggtctaatttatctgagtttttcaatttatgtatgtagagttattcatagtatcccattattgtccttttaatgtgggcagtgataaccactctttcattcttgattttgttatttgtgtcttctctcttatttgtcactcttactagatataaagtttgctgatctttgttaaataatcggctttggttttattatttcctgtattttttgtttgtttgtttcctttctgcttgctttagatttactttgctcctcttctctagtttcttcttaagatgaagcttagattttggatttgagactcttcttttttggtgtaaacattttgtgctatatatttcttcctggtccctgctttagctgcattccacaaattttgatatgttgtgttttcatttttgttcagttaacaatattttctaatttcacatgaaacttctttgatccatgaattatttagaagtgtgttgcctaatttccaagtatttgaagatattcctcttatctttctattattgatttgtagtctgattccattatggttaagaacctacttggcatgatttcaattcttttaaatttgttaaggtgcattttatggcccagaatgtaatctgtcttggtgaatgttccaggtgagcttaaaaagaatgtatattctgctattgttgggcagagtgttctataaatgtcaattattactagtcggctaatggtgttgttcatttcttctatacccttgctgatttcctgtctgctagttctgcatcttactacgagaaggatgctgaagtctccaattataactgtggatttgtctactttagttccgtcaggttttgctttgtgtgtgtttgaaagtctgttaagtgcatatactttagattgttacgttttcttggtgaattgacctttttatcattatatattatccctatatccttgtaattttctttgttctgaagtctactttatctgatattaatatagccactcaagctttcttttttgattggtgttttcatggaaaaaagtatatcttttctcctcttttttgtttgaaccaaacctatctttaaaacttaagtgatcttcttatagacagtttatagtcgggtgattttttaaaaatcgattctttgaatctctctttcttaattggttgcattagacaatttatctataatattattatttatatgtttggatttaggcctaatattttatttgctttctgtttgtttcctgtttcagttttgaaaattagactaatttttcaaaaactttgaactctcttctttcttcttttgaatcattttgaacattttcagaattttttttggtctgtggtatttcttatacttctttatatagtttttaaaaaattgattgctcatgggtttgtaatgtacatacttaactttttaagtctacttggattccatgatttgcctctttaagtgaaatgtagaacccttaccaaactataggtttctttaccctccccattttatgttatagttgtattatgtattacagctgttgcaaactatatcagacaatgttataatttttgcttttatctattttaaagaattcaagagaagtatagtctattatattattctaatatttattaatgttgttgttttctctttgtttccttccttttagtatcattcctgttctgtttgtccaacttatgttagcagttccttcagagccatgctctggcaacaaacactgttttctgtcatctgaaaatatctttatttcactttcattacttagggacattttggtggatatagaattcagggttcaacattttaaaagtgttgttctactttcttcttgcctccattgtttctgatgagaaatccatagtcatttgaattgtggttacctataagtaatgagtcatttttctccgattgccttctagattttctctttgtctttagttttctgttgtttgcttacaatgtgtctaggcattattcttttgggtttatcctgttggagttcattgagattcttcaactgctaggtttgtctctggggaagttaaagaagttttcacttattgtttcctcaaaaaaatttttttttcctgcaccatattatttctgctttccttctaggattcctatgatgcaaatgctaaatctttttctgatgtatcagaggaccctgaggctctgtgtgaaacttttcaatacttttttctctctgttgttcaaattgcacaatttatattgacctagcttcaagttcattgactcttccctccatcatctttgctctgctgttgagcccattcagtgaatgttttagttattgtattttttaattgtagtatttccatttgatttttaaaattttgatttttaaattatgcatcccgtcttttacttctttacaaatgtgttctttcttagttatcgggaaatagtagttgctttaaggtttttgtcagattattccaacatctgtgtcatctaggcattggcatctgctgattgtctttttccatgcaagttgagattttcctggttactcttatggcaagtaattttttattgtgtcttggatattttaatttttttattatgaaactctgattcttgtttaaattttgtaagaatgttgataattttattttggaaggtaatgacctgctttattttattttactttattattattattgttattattattattatttgagatggagtctcactctgtcacccaagctggagtgcagtggtgcaatctcagctcactacaacttctgccttctgggttcaagcaattttcctgcctcagcctcccaagtagctgggattacaggtgcccaccaccacgcctggctaatttttgtatttttagtagaaacagggttttgccatgttggccaggctggtcttgaactcttggcttcaggtgatccactcgccttggcttcccaaatactggaattacagacacgaggcactgcgcccggcctgatcggcttgattttaggctacaggttcttatggggcttctatgggttgtgacttcaatgttagttgagttttcaaagcgttggcagtgctatttggatctgtccaatattgccctcagactgggtggtggtctatattgtagtttagttcttagaatctaaatgtgctgtgtagggtcagtttcatccatgcacagcttagcgtgagccccagagtttataaacaatttagtgactacttccccatgtcctctttctatgtgatctctgcaatattttcaggttccctggggtcttcctttttgatcttttgatggaagggctgctgaggctttagttatctggctttctgtatactttctgtgattgtgttcacatctggggccaactggtagaagggcagagagagacaaaaagcaatagggtttggttttcattctctcaggaccataggttttttgggcagagaggaaaattctcctatctcctttaatctttttctggcttgcattgtcaccactgctactgccactactagatggcttggtgttggggcacaggaggagagaaaaagaaaggaagaaaggaaagaagaaagagaggaaggaagagagggaggaaggaatggatggagggagggagggagggaaaaacagtgatttcctccattttttctaagagttacctcgcattagttagttctactatgaggcttctcctggaggttttttgtccacatcttgatgatcccttccaggttctggctgcctcgaggtcaggctagaggataccagaagagaacaatggtaaattcactgctgatttggtggtatttctaattcgggtcttcttcaatctacctgccattgtttattctcaatgtcttcaaatagctgctccatgcattctgtccaggtcttagaacatcattcagtgggaaagacaggatgaactgtgataactccatcttacccagaaccagtaactcagatatctctttagccgccatatgctatgtttgccctgtacagccagaatggggagaatattgcctttaagtcagggtcatcagcatcatggctttttagcatattcaataatcattctctgtggggcaagtttcaggtagttcacctattttttttttaatcagagcctatgaatactataattcagcaaactgcattacagtggcatcctgtgcgtctcctggtagaacaatgtgaggtggccgtttcaacttcaaactcatttggctgatttagagaaacttaggggcacctgtaacatgacactgagatcaatttaggcagccatctgccatcttgaagaatggcatgcaataaaacgtttgaactgagtgtaatttttgtggtttttatcattaactgccacatgtatttcatggtaacgagtgatgcagtcccagtgattagggtttcatgttcggagaaatacaggggtcctgtcttgatggctgtactctgtatacactggaggatgggaagtggatgtaactaattaatatctatgaataagagtcatcacttcctctcttttttccataccctgtaagtagatagggtatctctgcccactgagaagtaacatatatctctgtgcccactgatgctggtgtgcagaagctctttgttgtcagtctggctgtggaagtctgtttattcctggcccccatacctgtggcattgctttttagggtgatggattctatcctttctcctttttctagactgggacaaataggtatagtttcttaagaagcttctgttgatttcttgttttggctaaaatttggcaatgagaaggacatttctatctgtggttgagtattttttttctctttctccttaaataggctagagaggcaagaacaactgaaagaggaatatttgattccccttcagaatgggattgggtattccagtctaactaggattcaattttgatcatctgaagatctcagatagtatttccctgctataagtacccatggaccactatattatccaaaattgctaccacagccctcacccttcctgttatccctggtttgtgaagtgtgaggggggttgtgcggctgtgcagtgggcagcaggatgggacagggcaaggattataagactctgattaggacgcgatttgctgtaagacctggggaaggctactgaacctctcttagctccctatttacctgctgtaaaaaaaatggaagagcttatggtatttttgaaagattatccgtatatgaaagcacctacccctcagtctataaattctctccttcaactttcttaagagatggaggtaggtgctgtttggctttctatttgtgatgagatttgagactgggtcagaactggatcactgatgggagaagatagaggaataatcctgatataaaaccaccctctaaggtggcataaaggcatccctacctacagtgcttacaattttgtgttgccaacacttttgtaaatgactgatgtcggggaaggtccctggagctctttgtggtgagatacggagtcagcagaattttctgactgaatacattttttagggcagcagcattgttcatcaacctaaatgacactggttttcccaaccccttcagcgtctctggcaattcaccctccactccctaaggctagatgattttgtctgcatggataggtgagaactaggtgcatctgtctggtttttcccagtcctctgcaacagtgaagatttgctgactattctttcccatatgttaatgaaaacccatccagcaagtgcagctttgcccagggagagctctgcactggtgttgactgcaaggagaacagctgtgtgctgcaatgagttacctcagtggatagacatgtattattgacttgaacttgctcatgggacaggtgagcatggggacagggaggggtctctttgcccaaacaggatcatagcaagtcctctccctctttccatcttataccaactgcagggtgatggcctgcctgtcagttttctggggatgctgaactacaatgagtggtaaaacattctagaaatgcaacaagaaatagaaaagtgtgcttcccagaactcttctcaggaggcagaaagtttgagattactttgaatactttaataaggtatttgggggaatactttgatacggtttttcggctaggagggatgagtctcctcctcccaaatggcatgttcaagtaatgacagatattttataacttgctttctaaaaagcatgggtctgcttgactgcaaaacttttcttttgctgagtatgcaaaattgggctcaagattgaattactagggtcagtagctgaagactctgaccagggatcattcctctctctatcaccccatctactgctctgtctgtcctccaaatacaagctggacaagtatttttaaaaagaatattttgaataagtaccctttttttttttttgcacactcatcctgtggaccaaggatatgctaggtatccattcaaaatcagtcgtggaggcaaggctggaagtgagtagcaaagccatttgataggaaggagaacgacaggtacgaatagtgtgtggggagtactaactgagagatgtgggcaagtgtcattctggtcatcagggtcctgtttgcccagggctcctttcagaaagccaggctgggtgatcctgcatcatgttaatggtgctacccacacatgatccattttctattttgggagaccatcatgtcccctcaaaatatcaacttctcccttatcatcatatctacccagagttaacttactggccgttaggaaagtccatgggtggcagagaggacctccagagaatattgctgtcttttggggacaaactcaggctgcttaatgtttctcttcaattcagagaaccactgtatgatcactgatgttccagccttttctagcagcagctaagcaataggaagccatgaatcacaggccccacatctaattggcatagttcctttgtctgagcagtagagctatcttgtctatcatcagcatcatcagcatcatcactatcactatcactcattacttataatgacagctgacatgtatagactgtctacaaggtacaaactcaataaatgccatctcttagtatggttagaacacatgctcatctgttgcatagaaagtactccacaaatgttagctatttgccaggcaccctgctaagcactttacatgcaccacctcatttcagctgcctccctaggaggtaggtactagtgttgctctcattttgcaggtgaagggaattaaggcttggagaggttatgctccttggctcaggagcacatgataaggctgggattttttgaagccagaggctgcgtgaacttaggcacttccctgctgtactcagtgagcactcaggatcatggtttcctcctcaaaggaaaactgctaagcccagctaaatacctcagcaatttataggctgcccactttcaatctctgaaccaaatgtctttttgatgaggcctaacatccactctgagaaactgcagaggggaatttctgaaatcgcttctaacttcctgtgaaaatattctctaactgacaagagattgtccagataacaatgaatacacaataaagctggcgcttctgcctttgctaccaggctcacaaataacccatttggcttcccaatcactctgatacctaaaactagcagaatttatgcttgcggctggaatggctctgttcagccagaaagctaaagtttacgactgaaccctttgctctgaaatgaaatctagtctctttggcgcgactttattaggccatattgtatggcgataggagacataagtacccagaatctgctgtcactaaaacaggactgggttggcgagcgttttcgtcctcacactcaatactgtgtcctaaaatgggaaagttgaatagaaattagggatgcaaatcagggccattttctgaaactttatttttaattgaattcaatatagtcatgatattgcttctgtatctacacaacccacattccaatggagattcagctattactggggtcactgaatcaatggagagagactaagtagataaatctggacccctgaaatattgtttaggctaattatcacaacagcccaaacacttggatacccatcttgtgcttaattgtctaaaagctttctctgtaactggctccaatatctagcaatacttcatggaaagcattctttttcatctctggttcaaatcctttaggctgtaatcgattcttctgaatctcttgtcctcaaggcatcatggagaatacttgccccttattcttcaccgtctttgggaacagctccttgctactcaaaatgtgggccctataggggaagcatcagtgtcatctgcgagcttgttagaaatgcagactcatagacttgaccccacctcaggactaaggcatgagaaactggattttgccaagacacttgggtgacatacgtgcatatcaaagtatagatagcactggactccatatttcaaaggacttttactaagtaagccctcagacacatccactggtgagaccttgtcatttgctaacagcagtggctggtgggattctcaccaaactgtctaaaatagtaaagatccttcaaaggcacaggcaactctctagttttttgtgttatcaaaagcaagctccccattcctatgtggattcaaatgttctttctaactcccttcctcttctcccagttttttttttgtttttttgtttttttattttttttttttagaaaagatcaagttgttttggcctcaattttagaatttaggaataatgaacttgccaaatatcaccttccctgggctcagtctacttcctgttgaattgttgtttgactttactttggaatccaaaaaatgaagacaaggagaagacaaggagggctgagtcacatggggaagatagaataggcatgagatggggagggacggggcttcctctcccagaggaatgcaggcaggacttctagctagtaggaataactccagttagattggtggcaatatatcagttcttgagagttttgtctttcaaattcaagcctccaagttatcggatttagaatttagaaaaccgtaagtcagttgctaagaagcccaagatgttctgtaatgaaaaatttcccagaaaatattgctcatagtaagaagttttttgggaagtgtaaaaatgacccagttatacatactccctggtagatcctaacagtgcagaaattttttccatgctcagaagcagaattgatttatttcatgccccaacactaaacgctatgaagttattgaagttattcatgcttacttatgatcagatgcctagaaaaattgttcttgtttctttaggcctctctctccagttttatcttgcttagttcaactcagcagatattaacccagcacctcttatttgcaaagtactgtgctgctccttctagaagatacagagctgagtaagacagctcttcctttaaggagcttacagtcgatacggaaatggaattccacctcattgtagttctcttcagatgtcagagaagtcaaatgctgtgatggtacttaatgctaatcaccacacatggagcacttactaagtaccaggtactgttctagacattctgtactgatcatctcattcagcccacatggcctcctgagagatgtgtgcagttactattcccattaaggcagggacagcacagcacattggtgaaatgaggaaaggcctcagagaggaggtagtttatgacttgaaagttacaggaagcactggattttgacaactgaaaaaggtcatagagagacatatttgtgatagaagcgtcaagggaaacagagatttcagggtgggaagtcaggagaggaagtttttagattagcatttcccatcttcttaagctgctccttgaaataaaggattctgtgactaaatatcacgttctggccgggcgcggtggctcacgtctgtaatctcagcactttgggaggccgaggcgggtggatctccaggtcaggagatcgagaccatcttggctaacacagtgaaaccccatctctactaaaaatacaaaaacaaaattaaccgggcgtggtggcaggcgcttgtagtcccagctagtcaggaggctgaggtgggagaatggcatgaacccgcgagggggagcttgcagtgagccaagattgcaccactgcactccagcctgggtgacagagcgagactccatctcaaaaaaacaaaaaagtcatgttctcctcttggagatttacaattcctcttaacatgttaaatactctaaggagtattgtgctgaaagtaaaataataaaattaaataaaacaagttggctttgttaaattctgtgcttcccaagtttatttcattcattcagaaactattattgagctatgactatgtaccacgcacagttccaggcagtggagattcaggtaaaaatctgtgccttcaacatttcccacattctagtaggggccaccacagaatcccctccccattctcctttgtttcagataacacctgctattaagttttgtcaagttctttctgtgaagtattagttgagaacaattctgcttttctgaagcaggggaaattatgggaagtcagatttttaagacagagtggtgccatgttgtggaccagcacaattccaagtgtggtccatggtccatagatggggactgtgagctgtttgatactcatccgtgacgagttaagtacagaagatgagagtaagtgcttagaaactttcaaagcaattggatggattaattttatatggattgtgaatctatgataaaaattttggatttgtaccttgcattggatttgtcttttcatttttttgtaattcttatttatttatttatttatttattgtctcatcatgttgtccagacaggtctagtactcctgggctcaaacgatcctcctgccttggcctctcaaattgctgggattacaggcgtgagccagtgcctggcctgtaattcatttttattagattttgcaaaagaatggatattagaaataaaagctaaaccctggtccctcacctcagatggggtaagaagggctgtcctgaaaaccctgcatacgaagctgaactattctggggttggtttggcagacgtctgactgaaaacatttacttcctgctcaatttacccaaataagaattattttcagtggtatttttaagaatccttattatttgaaggacatgtaaatatgttctttactattagcaaggttgcaaaaccaaattcctctctgaacagagagtgaataggccaatctttaaaaaaggctcttaagtgtaaacaccttttctatattggagagaaaattgaggatagggtggcaaaaccttctatgtgttaaaaaaaaaaaaaaaaagaccagtttcctgccacatatgtaacactttaaaaaataatttctcaattattattttaaaaagttctcatatcactcttgctgtttacccttcctttaccttcagttcctctggcactctgtctttccagaaataaacctggttgggataatggagtgagggaaaataccatgtattctggtacttttacatgtggtgtagtcttttaatcgccctctgaacacctcgtgtgggttgattctttttcataatgcctgatggaagaaatctcatttgatagtctgcagcccactggtctgggagtaagagatttggctcaagtccattccgaaattaatatttggagttgtttatttatttgttcatggctgaagcaaccagttttctggcattccatcaaatccccccaaaattgttttaattgacattgtcctgaagcctttggaaaaatctgagatctttttgtcctagtcacacattctggaaaatgctctctgaaagaggccataattgtggaatgccaaattgttatggagtccctgaaatccaagcaactttcagaaaggcagctgaactgagtccacatccaagaagttcagcgctgagatgcagtttggcacagagaagaaatacattctgaaaaggtgcaaatcactattctcttctgctttcttcctttggcttcaacttgatcactagttaactccaccccagaaagctgtgcagtgaggcattctctgtgctggcaccatttggacctcagctaacaagactcaaacatttcattttgtttattctatgaattgcttttaggatttgcaattatactgaagaacgaagaggctaagaaggggtagagaaggagataaccacatgccctttgataaaaactggggcaagtttgttgacattggaacatagagggaaatagaggaggagagaatctgacaagtcccatgatgaagtcttcttaataccttgctggccttaacatcgtacttttcagcaagaaatgagaaaacgcaagattcaattaaacttttccccttgacagagcatgctgttgaggaatggatacaaatgaccccccatccattttagtaaccagcccaaacattcatcaacttagagcccatcaattctgatttcatgtttagtattgtaggcaaggacttgacacattttgtggggttttcttggggggtgtggggtcatgataaatacgttttaatggcatctaagatatgccagtcagttcatatgactgcattctgtttcagacaatcttattataaaggacagtgacaatgtattgcataattgatatatataaatattcattcaaatgtctctaattcttattaagcacttctaagatttaaaactgtggatcctttataggaagaatatttactgaaaattcagatagactttttaaaaatagtaaatgtagtaagttcttgtgaatacactaaccttctactacctgttttgggcagtgttagtgtgtatatgttacgactcatctcttcttattgcagctattaacataatggtcattggtttttataatttccttttagtgctttatttttgatgtgcataatataatgtatatttggattaaaagaatttgcctgttttcaattaaataaggactagtatatgacaatctttggaattatttacatgacttcacgggtagaggtggacttttgcaagattatttggctgtaatcaacacagttattcagactttttactgggaacagaaatcatgatggctgtaacatactcccagccaggagagttgaatttttcacattcactgggctgttagcattagagaaacacagtttcactctaatcagaggaagcataaaaaataaaaggcatcattaccaacccaccattagtgacacacacagaacctgggatcaggaaggtgtgacttcccgtggagccaaggctgaggtttccagttggaaggtacatttgatgggggagctgtctgcccgtggattggtgtgaaaccatttgcttgggaggttcaactagactggatgaaaaattagataatgaagagtagataaataagacagtaaatgagaggtgtaggcaagctagttcattggctcagtcccctgttctcactgatgatcccgtgtgtatttgatgaataaggacccacagagcatcatctgctcatctttgctaggcgctcttctaaaacagctggggtttgatgtgacagccaaaggataaattgctgcctcaggaaatgctctgcctttgactgattgctgaatggctggcaaattaattctggcacctttccctaagtcattttggtcccattccttcatttttttctgctgagaagtgtgtcttcacattacagttaaaaatacattgacaacacaaatgtggggaacagcatgtactattttaggaaagaagttgtaggctaggaagtttccattttgtataatagaaaccatacttttatgctctgagaggaggcttgaaccgccctttcagctagagccaaaatggattattactccttgctagacgtctcgtaaagtcataggctacagagtttgggcttttgagtccttgatgggcttcggttttgatatttccctctttggtacttgtacacagcaaatcctccccattccccgaaatcctaacaccacaacctccctacacctctatctttgtggtgggtggttaagagtgtgaactctgaatcctgtttgtaccacggattcactttgtgactgtcagcaggtttcttaacctctctgtgcctcagttttatcatctataaaaggggaattcataatgacaataactccctttacctggtccagatttctttgttcactttcattttcttagtattaaacacaaggttttatttatttattttagagacaggatctctctctgttgcccatgctggagtgcagtggcgcagtcatagctcactgcagccttgaactcctgtgctcaagctatcctcctgcctcagcctcctgagtagctggcactacaggggtgtgctaccacacttggcaaattttttaattttttgtagagacagggtcttgctgtgttgcccaggctggtctcaaatatctagcctcaaacttcctgcctcagcttccaaagtgctgggatacaggtgtggctaaggatttaaattcaatgtattttacactgttttttttttctgtcctaagaatgcattgtatgagaaatgtacacttttgtttttgcttttccaaagtaagtcaaagataccacactcgagacttagaaaagttaccttgatagaaggtgataatttcagcccttgggtaggtataaagactgaagttctgttgctgagtttgtgatgcactatgatgtaatgactctgggttctcactcctgacttgtctgatgtgattggcctattcgtgtccttgttctggcatgacttaaggattaaatggtctcagtattaattataattactgattctcctgctcttatgttatacataagggttttaaaaatctttttaattgtgataaaatacacatacaaaatttactatcttaatcatttttaagcatgtagttcagtggaacattcacatgactgtgtgaccatcactaccatccacttccggaactctttttatcttgcaaaacggacactgtctcagttaaacgatgactcctcattccctctccctgcaacccctggcagccaccttcctactttctgtttctatgcatttgaggactctaggtacctcatataagtggaatcataacacggttgtccttttttgattgggttatttcaattagcgtaatgccttcaagggtcatccatgttgtagcatgtgtcagagttttcttcttttttaagactgaataatattccattgtaaattaccacactttgtttatctagtcatctgtccatggacacttggggtgcttccacctcttagatattatgactaatgctgctgtgagcatgagtgtacaaatatctctttgagatccttcttccagttcctttggatatatgcctagaagtggaattatgaatccaatggtaattctatgtttaattttttgaggaaccaccatactgttttccacagtggctgtgccactttacattcccaccaactacatacattgcttgagaatatgacagtgtaattcaattagcaattttagactctttttaaagtgaaattcctttaccagaaacctcaaaaacatattgactatccatatggaaatagtgttaaagatgtggaaatcttaaacagatggcaatggcaacggatttaaatgctccagcatttattcagttgattcgatgctactaggtctagtgtgtagagactatccgcaggtctacacaaggatgtggaagaggcattttgttttctagaacattctgtacttttttccagttatacgactttcagtcctcaagcattttgattagccacagaggcaaacttgcaggaaaaaagatatggaaaaatcagtaaaagtcagatatatgtggtcaggtatatcatagtcagatacatctggtgctttctctagcaaagagaaaaatatggggaagtaaataccagttttgatttaatcagaagctagaacagatcctaagattaaaaatatatgcagtcaatatttgctgaatgaatgactcaataaaacaatttttgctaaattcaaaacaaacatgaataatattgttatcctacaaaaaatgtgttccttcttatttaaaaagtttagtgattcacctacaataaaatttggtataaagaatagcttcattaggacataaaggcatgaaaattctgaccaaaactaaaagaaccttgttaaaaccatattaattgaggaataccaccaatgatcaataataaaggtttgtattttcattatttttgataatcagttgttgtatttaaattagaccataaacaacacattataaaagaacacatatgaaaagaataggctgaattattttacttcaggaatactatttgcccataaggctctagtatggggatttgtaattagtgatacctcatatagtatcctattcattaataaaacaaattatgttaatactgtttcccaaatattctatattccaacatttttttactaaggcagattaggctttcttcaaattagttagagttagtgacctttgcttataagtcaagcatatcttttattcgaaaaaaattattgagatcttatggtttggagaaattaaaaagttcaggcttagctaaacacattgcagttaatttttaaaatcataccatttagcaatagaattggttgagtgacttttttttttaaagaccccactctggggaaggccaatttgtagataaactgctcatacccagcagcactgcctagctaatgtctaacctgtgggagtaggctggaagcagctcaaactaatgaggttaacctacataatctaattgcccagactgagctaaaagcagacaaagagcacagagccagggagccttcagtttatttctaaattttttctggcttttgtatgctggagtgtcaccaagtagatggtaggtgtgcccttgcccactgttcctagctctccttctggtccacatgttgcatttctcccagtgaactgactgactggctgccagcaagatgccttttaatacaagataagcacaagccgttctaaagagccacttcctgttggcggggtggcttcctctcatcttcctcttacccatgcccccactggaagggaagcctgagaggctgcagccaaagacacacagcttgccctccttccctcagggaggcctgtgagatccctaagctcccatagcggctcaacgttctccttgtaattcaccagtttctaaagactgactccattgtaagccggtagcagtggctcatgcctgtattttgggagcattttgggaggccgaggcaggcagatcacttgaggtcaggagtttgagatcagtctggccaacatggtgaaaccctgtctctaccaaaaatacaagaattagggccgggcgcggtggctcacgcctgtaatcccagcactttgggaggccgaggcgggcggatcacgaggtcaggagatcgagaccatcctggctaacacggtgaaaccccgtctctactaaaaatacaaaaaattagccgggcgtggtagcgggcgcctgtagtcccagctactcgggaggctgaggcaggagaatggcgtgaacctgggaggcggagcttgcagtgagccgagatcgcgccactgcactccagcctgggcgacagagcgagactccgtctcaaaaaaaaaaaaaaaaaaaaaaaaaaaaaaagaattagccaggcatggtggtgcacacctgcaattccagctactcaggaggctgaggcaatagaatctcttgaacccagggggcagagattgcagtgagctgagatcccaccactgtactccagcctgggtgacagagcaagactgtctcaaaaaaacaaaaaagaagattcactacattgtgaaatcctttcagagatgcctagcatgaagagggttgctgggaaaaccagctaaacttgactacttagaaaaaatgcatattttaatgaaatttggagcaagacctctctgaaactacattttacttttgtgatactccttttgaaatttggagcaagacatctctgaaactaacattttaccttttgtgatattccttggggggtcagaaaaatctgtcattttgtgcaaagtagaaatatactgtttcattataatatatacatgcttattataaaagccttcagacaatacaggaatctatagaggaaaaaaagtatcattctaccactcagaggtaacaactgttagtgttttgatataaagcttcctaaattctttttatggctttacaaacattcagataactataggccatctaaaaaaataggatcagattatgtacactattttataatgtgcctttttacagaatttctgtatgaacaggtatacattttcattataatttttaattgcttcttagtattccattgtatgtgtgccatttacggttatttcccatttttcatgaatagaaaggatgttcttgtatatttttttacctctgttttcctgtttctttgctatgaatacttcaaatggaattgtagtgtaaaagactgtgtacttttacaaattttgataataattgcaaaattgctcttcaaaacagttgtatcaatttccttgcccactaatgtgggtgagtgcccatgtctccgcaccattagaagtcatacagattaaagactgtgcacggtggctcacacctgtaatcccaggactttgagaggcagcagcaggaggatcacttgaggccgggagttcaagacaagcctgggcaacatagcaagactctgtctcttaaaaaaaaaaaaattgccaggtgtggtgatgcacacctatagtcccagctactccagaggctgaggcaggaggattgcttcagtgcaggtgtccaaggcttcagtgagctatgacccactgcactccagcccaggcaacagtaagaccctgtctcaaaaaaaaaaaaaaaaaaaaaaagaaaaagaaaaaagaaaaaggaaagaaatcacacaggttaaaaaagtgttttagagggcacacactttatgagtttagggttattgaaggctttatatgggtgcagaggccgtgttcctgattgctgaaaaggtcaccattatctaaccagtgcattcatttgtttgcctaagagtgtaactcaggtttcccttttacagcccaccgtcatattttaaactctccgcatgtgttcctttcctttagattgaggaagacacatggcagaaatactacttggaaggagtctcaaatgaaatgtacacagaatatctctccagtgccttcgtgggtctgtccttccctactgtttgtgagtaagtgacctttaactggatgctctttggctttcagggatattgaatgtgccccttgcaaggaagcctcccacctctgctgggtacagttggagcacttgacaattgccgagggtatcccgtgtgctcggccccatgtgatgaataggagggtgggtcattacatggcctctgcctggggaatttccactggccccacttttcttgacaggcctgagagtcttggacttgaattcatcatttatgctaacttatgaactacagttatcctgcatgccttctgtgatgtagacacatttatgaagagtggcataaacccctgcctgtctgattctaagagggcaaaacaaatcttgccagcccctcaatgaaaggaattttaatctgtcttcccatcaagtctgatcatagagacaacagagaagctactgaaataaagccattcaaagtgttttcaccctttgctgaggaaatgtggaaccaaatatacagaaggaggccttgagcccccacatagacaactgccatgttataataataacaagtcttagcttctctttccactggctcagcaggatggatcaaagccacccgccatggccactgcaggtagaatagatggtcacctatgggggatgacctcaagagctccaggtgtctgccgtgaggcatgacagtgcctcagattcctcacttagaatcctcatgtttgcaatcccaccacttttagaagctgaggtgagaggatcacttgaggctaggcattcaagactagcctgggcaacacagtgagactttatctctacaaaaaataaggaaaattagccgagtgtggtggcacacacgtatggtcctagctactctagaggctggggtagaaggattgcttgagcccaggaggttgaggctgcccaggaggttgattacgcaactgcattccagcctggatagcagtgattgtatctctaaaataataataataaaaaatctcagatgttgagtttaagatgaacggggtctttgtgccctctgaaaacacaaactccctgaggttggtgaaacattaagcctattctcctgacaccttagcaaaggatttgacaaggattcttctcactgggaagaaacaggggtatctgggagctcactgggctgaggaagaaaagccatttgcttgcacttcctgcctacatacaaaccaaaagagaggtctgaagacatcgaaacaaaactgatcaggctttaccacaaaggaggggacagtcctgggtgcccttggcctcctctgtatcacggttttctttctgtatgcaggagggagggaggcggagcgcttggtggcttcgtgtttacctggagcctcctgtcactgaacacagcaggtgcactctgtcagtccctgggcccagaccctaagcaatccaaaatggtttggctgtttactgaaatttctcaccctgtctctaagcgaaagttttaatgctaaatggactggaaaagtgaataggtaattgattcggaaggagttattttctgaaaatggatgccctattgtgactcccatgtgtgcctttctttgagagctatttctcttcctgccactgagaggagttaagcattcagaggcattgggtcctggaacactgaggctgtcccaggggatctccccctccctggagcttggtctgcctaggatacaaagccccgggggaaagcaggctttttaacagaagctagttttataaaaaggcaattgaagccttggctgtctaatgtggtggtggtctgagcacatagcagagctgccagcgcctgcgggagtcttatgttggtgagggtgtcagcaggggctccgtcaagcccccttccttggctgtagggtttccctggcctaactggtgtttgtatctaacaagagtgctccctccccaacccccaggcccttcttgcttttccacccttctcttactctgctcttgggaactgagtccgttcctcttatgggtaacttgaagggtcaggactgctccccctacaggctctaactgggatagtcactaggtatgtttgactcacgtagatatcaactagttgctgatatttccaaatagtagtatgtcacgtaaaaactagatttctggattctttagaaaatctaatgtgacaatgcaagacctgcatttcctcagaatgctaactggctccagtttgatgtagcaaaggggttagtatagtcatgtagttactcctccctgatatcttaaaccaggccagatttgcacataaatcccaggcctggccctgtggttgtgtgagtttgccaaccctgacccactgggtggtgtggaacttcactggccttcagccagctcaagagctggcactagtggctctgtgaatattccctttgattgatttttgtatttagaacatgtcccaagaaggagacaaattgttgtcagataatttagtatttgctcagtaaagtttctggaatatatatatattccacttctgatgtgagtgagaatgtgtacaacttagtgctattattcgtttaatacaatgatacagcagaggtagaaatgatcaataaaagaaggacatttaatgagatttaggaacatcccaaaacattgaagctctcctcaagcatttgattatctggaggcttaattatctgtgttttctactttaaattaaagaaaagccataactcaaagttaccagcagtttaatgataacactcttcaattcaggttaattaaagcacagccgtaattagagtgtagtgttgtatatcactgggctggcacataagtattttcattacagtaagaattggctattcaatttcaaaatgacataaaggatgccaaaatatattttaagctggttcacgaagaagaaaaagaattggggaatattctgggtatcataaagcacagataaaatatacagattttcagagcagtttctgtaattatgcgctgcgctaaaacaatatgcagccaataacatcttaaagcatggaaagaaataaatgtgctttttctctaggctggcaaaatgctcccttgcagggtgggattgggagagcttggagttttctcagaagctaggggagtcattctatgaaaagatatgggagcaggatgtaggggtgaaatttgagattgtttcccaagagaacaggaaggagagcaaaagaggcagtgggggcagaaggtcctgccaccccgaaagctatctctatcaatttcaagccaagagattctcagtgtagccttcagtctgtggccaaaggcccaagagcccctggcaaatcactggtgtaagtccaagagtccaaaagctgaggaacttggagtgtgatgttcaagggcaggaagcatccagcgcaggagaaagatgaaggctggaagacttcacaagtctagtccttccactttcttctgcctgcattatcctagccatgctggccgctgattagattgtgcccatccagagtgagggtggatctacttctcccagtccacagactcaaatgttaatctcctttggtaacaccctcacagatacacccaggaacaatactttgtatccttcagtccaatcaagttgacactcaatattaaccatcacagatgcttactccaatctccttctctgaaataggagtgctatgacttatctgtcagtacgggttaatgtcttttcccctctccctcctctccttttccttctacctttatctttctcattgaatataatagaagcacttagaaagaaagaaacacattgcgagctatatgtgtatccaagttatatttacttttaacctttaggaaattctcttatcggttaatcaccgattaatcagatatttaatgaattgggatatgtgcaccattgtgccaagcttggtgccacttctagaggaaactgctactagatttgatcaaatatatgtgcatgaaaagattaatagcaatacttacaaatgccaacaaatgccaagtaaaatattcagtttccctagggtggctgcctccagagtttactgtctggctaagggaaatagtacccatcgtcagagagatctagacacccactgataagtgctgtggtagatgcacacagctggaatagagatgctgagagttatagggacatctccctgtaggctggggggacatgggggttcttcctggaagagatgacatttgagctgtgtcttgtcgggagttttgattcagatgggggataaagaaggaagaggacattctaagtggtagggaatctggaggctgcgccacctggtaccatagggagctctctcaacacctaggtctccgagattttccagttacagcaaattgctttcctctttagatgagacaaagagatgcatcagatttattttgacttgtgatttttttgggggaaactgataacagtgtttttggtgagcacttgcgaaagcgagggtgcactcccctacccccagggagggcagaggggaggggaggggctggacaaggaggagctgcaggaaaccatgggttcagcagttgggctgcctcaagaacactgtgttctaggttctgaatctcaccgggaacctattagtcagtcattcatcatttgcaaaatataaaagcttaattgtatcaggttttacagctcagaggggattaggacaaaagatgtatttaaaatatggtatgtgtctctctctgtccctctgcagctgatggagcagttaaaattcaggtttgatgtggagtatttaatgcctggggaacttggggaactccaatcagatcttcctcagctgtgctgaagggcaggagttctgtccccaagcccaggggcaagtatggatgctactgtgctggtttaagagtgcagggggattctcttttccctcctctacctccctgcattcagtgctcccctcctaaattcagaaaatcatgctctcaacctgtgttattttgcacagacagatctttaaaaagaagccgcttggggaaatttaaaatttaagaccgcccggcgaaagctgggcctcttgcccagtgaaaactgtagctagtttaacttcagttctgtgaaatcattagtttttggagaaagacatccaaatttgaacatggagcagaaaccaggcagacccaattgttatatgatagatttctttagcctggctgcaaaaatgagcattttaagtgaatttatggagaggctcagatctctctctttttttttttttttttttgagatggagtctcactctgtagcccaagctcgagtgcagtggtgtgatcttagctcacggcaaccttgtcctctggggctcaagagattctcctgcctcagcctcccaagtagctgggactagagacgtgtgccaccacaaccggttaatttttttgtatttttagtagatacggggtttcaccatgttgccctgggtggtcttgaactcctgagctcaggcgatccacccaccttggcctcccaaagtgctgggattacaggcgtgagccaccgcacctggcagatctcattttttaaaaaatattttcccctcacagaactggctctattcatccacttgattggggagtattgtaattagggttgaacatatatgaatagagatgtgaatacagtattggtggttatttctactacagagacccaagaggtgaccttctatgagctagtgaataaaccgttgaccctaaagtctattgaaatcctcaataacaggctactgaggcagtggtgggtccagaattctctacagaagggtcagggaaggagtcctgttggaaatggggtggacgcttgggctttgactcaacactgggttcttgtagcaaacacatggttttttctttcatattatgtttctcattaataataatagcaaggctctctaaaaatgcagttgttcacactttaggcaaaagttaattgtctgtatcaagtaatgtatttataaattctagtgtcttaggtgtgctagtggagattgtgtgtgtgtgagtgtgtttgtgtgtgtgtgtgaaagagagagagagaaggagagaataagagagtgggagagagggtggggatattctgaaaccttcccactccactcctatcaaagcttcatagagaaaaagagtcttaacatttccatgaacattttaaatcacttctcttttcttggtgctgagtcttggaaatccggatgtttcaaagtttctttacctggatatttcgatttctagcggctgtcattttaaattaaagctcctgaatgtgaatcttttccattccagcccctcgatccagaagaccttgtttcccaatgtgcagtgtttgtatccgtatctacttcaattgcatgtgccaacctgacattcccaggggccctctggatagctgaagaggggctggtgctttgggtggggttgggttcagggggaatgatgacagttgcttctttcatcctccctcacctgacttgtggggtgagtcctcttcaacagccccaaacctcctctttgtattttcttcctgaaggtgcaaactctatgacaggtttccatgtttaattaacaccagcaagtaatgtttccagtaaagggggctgatttaatggcaggaacaatgtatttccctctgggtaggcagaaacagttggactctaattcttaagagcctttgttcaggaacatctgggttgaaactactgtagttaacagatgatgttggcagtaaaaaaaaaaaaggggggttgggctttgtataatgtcgttgtcaaatttggtagacctttacctaataattatcaagaaagcaatctaacttgttattataacagttttattgcagattgctggcttaagacctttttgtgacaagtggcattttttttcttgaaaaaagaagtcatttctattcccctgtaattatttttgcaaccagcaacaacttcctgcgttggacatactggggcattttattttagaaaccaataattaaattattgctagcttatggctgattttatcccatttatcacattgtgaaggctttcttacttccttttttccccttacctcacctcaccctgcttcctgatttcacaccaattctgtatatgttgaaacactgtaagttgagtaaaggcagaattagaataaggattagatggctaatgctcattcttctttaccaaaaaatggtgttgagtgatgcaagtaaatgtttaaccagagaacatcagttctgggtatactgaaagtatatatattcttgggagtgtaaggggtacataagggtataagagggtctctagaaggtcccaaggacaaattgttgtatcttagaattggacttgcatcttggcattgtggattgaaggcaaaaattagattcccagagcatatcactacttttatttccttctgtatccttcctttcccatctgtctgcttctaacaaataagacaagctaagaagcagcttgtttcatgattctatactcacttccaagctttctctgcatagactttcctagtttgccactttatcttttctccatccctccagccagtcatgagattctactccccattcatacatgcatttatttatccagactttactgaaggcttactctttgaactttgcaaaatgccagtgaggcaaagcatgcatcctgtacaggaaaaactcagtctagaggggagagataagcaaacaagtgattaccacaccagctcccctgttcattcaccttgctctgctcttccccaatggacacctccaacagaggctgcatctctgcaacaggatgcagtccttaagcccaggattgtgacattggccaactctctgtggcaggatctaacagaaacgtgtgatttgaacactcacagagggagccatagctcttgcttccagtgtaaatcatggtgtattatacttgatttgtattttgcaatatctagaggatacctattatagtagggattaaaaacttagatacctatagggttcaggcagttagcaagaaagaatgaagagtgaggccatctgagacaatagagagtggtgggaactgtggcacattggagaacaaacatcccatccagagggataagtgcttcacagctgcactcccttttagcatgtggaatgtggtgccaatgtggccctatctgattttgcaaggaaagctgaaaagccagtttctatgtgaattcacttgttggcatctatttacagttttttaaaaaacactgtacttaccaaacagaatgtgtctgcctgttgggcttgtgactgccacttcatttcctctcttctgatgagaagcatctgtgcagcacattgcgtcaaagactcgatttccacttttggctttttacataaaagtcaattgaccttgacctagttgctctcctctgtttgggctcagtttgttatctgcataggaagggcaagatcagccaatcttgaagggcttgagtctgaaaatctgtgttgtggcacggcttgcctatgttctctctgttcacatcattctatccctctcctttcctttggccagtgggccacagcttgttttgggtcaaaggactttttaaaaggggcttctataaggcattgtagaatcagcttgggtatggatttgaatgttttgaagttatggatttaaaactggaagaggactcagatctgcgggtccatcccctataaggttaaggaatgaatacaaggccacatagaccttaggactttcttgtagaggaaactcttttctttttatatccagttggtagatggtactgtagtagctaggaagacataattcaccattactacgaactgttacttcccttcttaccagcgggattaggtttataaaagcaatgaagatctttgatcccatgaactaccagagtcccaaagtggactggtcattgctcataggatattagcaaattaacctttgcacgatccatactaagtttaagatcagccttctccctgatgtttttgtatttagctactatttacattagaaagtggttacttaatttggtaatttggttcaataaacattgcataagctatcttattttttaaaaaaacaatttaagctccagaagtaacagtcccataaagggtgcatgttagcagtgctctttgggacataaattaaggatggcattttccagctgtagttggatatgtgtgttggtgtttcagcaagctgcataatcagcacaaagcccaggtcattagattctgctggcaggaatcagaaaacctgcaaatcaccaggagatcccagatatgcctggatagaagtggtcctttgacatctgactgtctgctgaaggcagtgctgtggaccacaacctcacatgtaggaatgagcaattggtttcactccctggagagcatgaggccttcagcagcactttccttgaaagcaacacatccccctatccagcacatctgattatgtcacttttctcttttaaaccaactaaaatcccccaattccacttataataagctgtagactccttgctctggaaagcaaagacctcatgatcttgctcccccctcatttcctgacctaatcactgtcacgcttgactttgctcactcagctgcagtcttactgaatttattgctgatcctcaaacactcagagctcttccctgcctcagggcctctgtgcttgctgtttctacttcctagaaagctctttccccatatcttctcatcatgctgttgtgctccctgcatcctcagaatggtcctcctgaaccatcacagatgatataccccttctgagttactctttatattcttaggttgttttattttcaacatagaacttgtcatcatctaggaatttattgtttattcacttgtatattttcttattgtctgtctctcccaatacaaaataggcttcactggagatcaagatgtagggtatcctgccaggtattagctagagaccttaggcatgttacatggactttctgatccttggtttcatcacgtgtaaaatggagctatcaatagaagtctgaataattggggtaatagcttcctcttagggatattgaggggattaaattgacccacaaggaagccttccccacactgtgacccagtatcttatcccccttacaatgctggagctaaataaataagcatcaactcattgttcagtctatcagttaatcaatattctattattcaaaatggtaatgctaattgtagacacttgtcatacatcatgtatgtaattattttgtttatgtgagcttttattctgtaagtatgtaagtgtataggttcatctaactgtattgtgccatttacatattcatgtatttttatatatttgttctatttacatgttcatgtctttttatatgatattatttattgatcttatatcttgaaatattctttgaaaagccatttagaatgctagtaccatattgcactgtactttatggccttattattggacatttaggttgttttctatttttctactccatataaataacacttactctgaaaatctttaagcataaacattttactgcaccttttgttattttcttagacttgaaacccagtaagtggaaaccatttgtttgtttagcttctctgtatcggtgggtctattcactatgcactatggagaattccaaacaagtccaggactcttaaggaagttgctctggttaaggagacaaagttcagacacatgaaacaatagggagcgaccacagccagtgtaaaattgactaaaggctcagtgatttggttacagacaaggtgctgggagagttttgagaatagaaaatcacagggtagcagtagctggagaagacccactgcttgcaagattagagttgacgtggcctgtgaggatgggttgggaagagagaagaagggatcgagagtggggaacgcacaagggaagggatggaaacaggaacaagccagcctcaaagcagtctgctctgcagtcgagagcaccaagcagatgaggtgagacagcttggatggagccaggagtgacaatgccatcgtcatgtgctgggcacttacacagaggccaagtattattaccatcattgcaagcacacaggggtctgctcggaacaacaatatgagccatttgtacaaaagaccgaaacggaatccaaataacaggtccagctggtccaaatctttccctccccctgtagttaacattttactacccgaccgagtaactaatgaatctggcccagagtaaatccccaggcacaaattcctgcttgggctctgtgtctagacagccagacctgagtgcaatttgcactttgagcatccagcaccttatcacttgcaagaaatcaggtttaatagggaagatggggaggtgttgcttccaccccctccctttggcacagtgccggtggaatgaggatcccctcggtaatgactgcattaggagaccgaaagatcgtaatagtgtgtgttatgtggctctggtcattcagaagaactgattgggaggcttctccatctcattgcaggctgtgttttgtgaagctcaagctcctaatgatagccattgagtacaagtctgccaaccgagagagccggtaagtttgcggtgacccagcagccagctgacacttttgatggtgagagtgcgttctgagaacggtcggttcacttctgctttcttgtgcattatttatctgcatggaaccagatgtaaaacctctctgaccctagagcacatttcgaggcatgccccatcagacactgcagcttctatgccagaccagcctggcacccaaagccctgctgggcattcagagagtgtttctccagggaagagggatgagtcctcaaaatatctccacctgatcatgccgacctggacttttcaccttctaagtattaaaccagaacttaaaacccctttttactgctgtgagcaaaaaagcaggtggactctggcctcctttacagcagccttggggtagagctgtgaggggagacaccaactctcttgatagccaaattacaagcagcctattgtgtaccatatgtgcttctcccggtgcaaccaaaatccaggtggcagaatatcagcttcatgtaaatgagccaggagagtggagctcagaggcaggagctctctttatttatttattttacacttaattatgtgcaaatcagactgatgagggactgggtctggttgaaatagataacatcccagtcaatatgtgagttcacactggaggtgggaagcatcgtgctaacaagaaattttgctgatggagtactgtacaccttacagataaaatagagatgatttttttgctccccagttcttgtcaatagttttggaagaaagagagctcattgagaaatgctcaagcttttgttctctgaaatgacacccacagtctattcctctatagttcatatttttgatcctgcagatgcccaaatgtagagtgcagatcccctccaacaaacaccttaataactgagcagagtacaggggaagactagacgtttccttttatcatcatttaaggagttttccttatctgggtgaataacccaatacagccagactttcaagtgtatagtctgtgtctatgacaagacaaaacaaaagaaaagaaaacactggattgtaaacagatcaatccaatgttttctgttaccttaactaccagatcagattgctcacaaagtcaatctgatcaaatgttaagctattttgaaaacccaaatcaaccaaaaggaagaaaaaaatggtagatttggtggccatatgtagaacatggctgtagcagttaacaaatatgtagatagataaatattttctttttcatgttggcaaagtgaagaatattgtttgcaaaaactgacagtcctgattattagttgttcagcagatgaggtggaattttctggggttactgtttacccatgtttttgccaatactcacttgtacctgtgtaggggaactgtatgtatcctggatttttgcaaatgatattccccgtgttgcgaaatcgcaaatctttgtgtaactcagtgttctctatttacttttgtgcatctttcaaaaaaaaatgtcatgatgtgggtgatgctgatgctgcatagtgtttttcgaccattctggaataatctgactgcaggagattgcaccctgaaccttgagcagttgtctttcacttgttgccttttggttccaaggagagaaaaagagcgaaaggctgttaatggttcattgtgaactcaatgtcactattctaagaaaactaactcagagcactccctgaagatgaaacttttcttggataggcccttcaattgagtcacaattctgagatgttttcaacaaagccatatttgtagatatagtttttagtatatatatatatatatatattttttttttcttcagaaaagggcaaaaaggacttgtttggctttgtttgggctttctttgtgcagttgccagctttaattctcaaatgtggcttggtctcagtgtggaagcacattggttcttgtggaaaaaggtgtgtttgagggaatgtggatcatgcctctgagaaaacacaggacttatcaaacacaatatccacgtgaaaacacacattttttaaaatcttccctgagataataattttaatgtttttctttatttaaacatgtcccacttctttccctctcacattttctaactgactgggtgtgaaaattcaaaggacctgtttctccttcccaccttctttaacctgtgtttaactgcctttgttgttggtttcaccccatgatactgttttcatgctttgccaaaaaaccttgttttcacatgcatccttcaagtgatttgaaacaaaggttttattccttctttccttctggtgtcagtcgatttattatcaaattgtttgattttaaattcttttcttgtcgttttgcagaagccgaaagcggtatgcactcttcgttaacttttcttccaacctccaccctctatcttcactcctaaccacaggactaaccatttgccaagaattcaagaagagagagattatatatatgtatatataatctcattcccttgtctggtgtatctatattatatatgtgtgtgtgtatatatatatatatatatatatatatatatatatatatacacacacacccctctccaactagagtacataaattggaagtagcctatttctgttcctgtttgatttgttggttcttttggatgacgcactaacttctttgcaggaaacctaagaaaggaaaggcacactcctgttttcagtcatggcaccaataatgggaacaaatactattaaagttgaacaggaggatgcttctctccagccctttgtgtctgtttctgtattgtcctgacgtgtcttgatgtccattgcactctagtgccattttgtctacataccacttccacattcccagtgacctcctcctccctgtgtcgagtttcttgtctatagagcagaattcctgtccttttatccacaaaacagagaccaagcccttacacttctatttttccttacatttattttggtgataacattttgaatattttatttcttgggcagtgctcagtatagtcttagaacactgctattaaattgccagattatcacacttgatttacagagttagtactgtttattgagacagactcatggcttttttttcctagtgtgtttgggcatatttcttaatatgaagtttctcaattttcaccatgtgatttcaccctgttttgctgctgttttacattgcatgaagcatgactaaatcatcatcaatggcatttaaaaaaaaacttttgggttaatagttccaggatagcttttcaataatgtgttatctaagacaatattgttgaaaacatactgttgagatgcctacttgttcatcttttcaagttacttttctctgtgattgtaatcactgtcatgtgtttgtgtttgtaattgtgtgtgtgtgtgtgtctgtgcgtgtgtatttgtctgtatctttttccaaaatctgattcttctgttgtttttttgagtacatgtgtataaatagaggtggcttcctgtcagtttggtattattgatatgatccaactgcaagaagttactgcaacactttgcatcttaaaggtccacagtggttgcacctctgctgttggcttttggcctttgagtccttttatcttgtggtgaaggcatgttgtgatgtaggcatgacttgtcctaagtataccagaaaatgatttggcttgctcccagaaccaaatatccagcattatcctttctagatcacctctctgttccccatcccatatggctaatatttttttgtatgtacgaaatatatttgaaaatgccatttctaaagttactgagatggatgcaggctgagtaagtcctcaccagtatctctggtggaccacagtggcagtcatttgagtctgaccaactgggagcaatctttatcatgctgtctgtgtgtaagtgaactgggcttaagtatattgacatatgaaatacacaactgtgtctccaatggtatcctaaagtaaaagtgtgtgtgtctagttgtgtgggactccagcagcagcatgtatttgaaagcccagaaaaaatgaaaagttccagaaaggtgataagatttgagatgtggggtttctctgaactgtgcctgcacatagcctgtaaactacaaatgcagtcatactctctgagaggggacacggattggttcaaacaaagttccaactgagagtcattgtatatgaacttgtgtgatcaaagaagcctcttctcaatggcatgattcatctgggcatagcatgaatggaaaccctaaatggttcttatttgcttgctttagttaatgaagtcccattagcttgctagacacaaatataattactacgttatcaagcacaaagtatgttctcatataagtcatgctattttttaaaaattgcctgaggaatggtacattacacctaccaaaaatgaaagggagaggagagaaatatatatgtatcatatttacccataatggatagaagtttccttaaacaatatctgtttcacttgaattacgaatcataggttgtcttcagaaacaggaaacaagtaaagtttacaatgattgaagacaaaactagatgtcccccagttatgcacaagtggtggagaaaggaatgcattactttcctccatcaagctgcagtcttccaacctgaccagtgtttagcgagagatacccaatgaaatgtgatacaacttgagacgcggtgctcctctcatggagggacctgatagaggcatttccctgcgggactgagccccgctagccaattgcacgtagatgtgttttatgtctaggaacccatatttctctttgaagttttgctttcaatgttgaaatcaattgccccaactttgcaagtggcaggctgtttacatattgggatatttacatattcatacttaacacatctgagagattgctagatcattggccaatcccctagccctagcagaggtgtggtcactcctttaatcggcctgactgatgagaattgtagcttgttctttgaaagaaaactgtgacctcctttccacttatttgtgaaaaaaaggaaaacttatggaactgaggctttaaaaacttattttttttattcattcaacaaatagttgaaatgtgcctgttgcgtgcaaggctctaagcctgctactccaggaaactcaaaggtaaatagaatgtgatcatgttttgtacccctctactcaactgtgggttccttacagaaaatacgtatttgctccatgtaggaggtgagtaaacaaagaataagtcgagacttaaaactagtctgagagcaaaagaaacagagacagcaagggaccacaccagccccgtgcttccagctgtcactggatgttttctgttgaaaccagtaaggtcaaagaagaaaggataatttatatgttccttgaaatgagggaaagtccacctctgccaacatgtccttgttggaattctgttaatggatatatgggctttttctcttagagattttcctgattcttcacatgacacatgttgaagtttatctctgataaactagtgaattatataaagttggagctagagaactgattcagagtggcgcacagagagagagacttttggcagtcagtagaacaaaacaaacttaacattggatactctcctaaagagatcagagatccttggaaaaatttatgtgttcctattagaaggtcaataacgaattctaaagatagtaggcaaaagggggagaaggttatcactatccagaatccttgtctttttatattttgaagaagacggggattagcattttatttaaactttctagatttggaatgtgtatagaagacttaatgtcgaaaatattaaaaacaaaaacaaaaaccagtaatgtagtttctggtgcttcagcgccaagagcatctttatgtatctagatttctttctttcattatttcaaggactggatccattctttagattcccacccagaaggctgccttagccttagcttagtatctgcaaatggttctgccttacacctcacatggggatgatttaaaccccctcacccctgttcacagggaataagagggcatcctggaatccacatgatctgtgaggtaattagagatgctttcgattccttacacaatcagccatagatttaaggaacacaggatacttcactgtgcagacaaaagtcagtctaaattagcccatcaccagatattgtgcagggataaaatgctttggatttccttgcagtcagtggaaaagtctttcaatgccaatagggcacctcctgggtcatttattagcagcagggacaaagtggagggtgatggtgctgtgaggatttttttacctctcagttttataatcacctagctcactgagagtagcaactaagaatttaagaccttctatgtgtcagtcatgtagcacatagtacatactttaactctcttagaggcattgtaagctagcgattattcacccattttacagatgagaagtgtgaggcttacctgcatttgcaaagccaggacccattttacagatgagaagtgtgaggcttacctgcatttgcaaagccagtgcatggaattttttgtgtatgtccttatacattattctgtagcgtacagttctttaccctataatttcatctcattaatgggcaaggtattttgataagaagactgtattatattccatggggtcagctagagaaaatctgtgataactttgttgaaaatgaaatacactttggatttttttttgcaagaattaaaaaaaggaacaataacccacatgcattgagccttctatacatcatctctcttaattctctaaagattattgttaccattatccacctcttgtaggtaagaaagttgagttctagggatatttagtaactggcccaaagtcaaacagctattaagtggtagtgttggaatttggacccaaattctgattgcagagccagggcatgtaaaaactgccttgcaggaaaggaggttaaaaaaatgtgcaaaatttataatcctgcctttctaaaacatcatactgaattggctttgaaagataaattcatctaaactgtatgagctctaacacttcaccctcgtgattgcatgaagtcagagggcttgttatacccatgtgaagagttggcggaggggtcattaggaggtgcttatggagagccgctgctcagtgcaggccgtgctattagtgtggactgctgctgtctgatttgggaggaatctcactgctgcctgtggttgtagggcagaacagttaaatcttcatagccttttggtattattgagtgttaataatagtcatgacacaagtacagtttcctcctgtcaggtattgttataagtaatggtagatgttcttgtgaccacaaaaaattattttgcaataatgatctgctcggaggtctcccaaccaggtgaacaaaggttcacctgggtccttcctgtatgactacagacgtatcacttcatgaccacaacacttctctggaatggtttatcagtaggaaaaaagattatgtgttaattaccatcctctatattttgattgtttggggcagctgagaacttcctttagactgattccaaatatctattaccttattaagcaacatcttttcagaacaaggaatacctctgttgtatctgttgttttattcagaatccctgaattcagtatccattaagcctgaagtcttttctcagtctctgcatcagacaatcttgtattctgcttttgatctgcagaaaattaaacttgtttgtttcatccatttattagattaggatacatttatctcttctgtcagtccaaacacaacttggtccgctaatctatttatgccactttgaaataggacaatgtatatttaggttcccacttctctgcagggcaagtttttttaaggggaggtttgcatttgttttctcaatttgcctcaattaggacatgctagacacacatcttattcaaacaccctgtacgtttttataaacagcagactggaattgttaagtatatccaactgctgacttaaaaaaaaaaactgtttgggtaaatccaattcttcctataaaggctgtacatggaatcaatttccatgtccttatcaatgtcatgaagacgttcagcttgcttccgcattggttacgggtgtcttgtaccattccctgcggtaatatgtggtgtgtgtacatgatgtttatgtatatctataggggtcccattaatgctctgtcatttaatggaaaattgttgtagcaatagcttcatcaggccaataatgcttccgtgttgaccaccaatagcagtttcaaaaggaatttattctgatggactttgcttcaaatcatgtgcccatgatggcagctagactgctccattatataaacccaggccctaataccttgatttgctttgatttcctcaactgggagcatgccagcctgggaagtaagcagtagtgcttaatgatggcattatccaactaaatgtatggggcagtggacattggactctggacaaaatctttggggaaagctttagactagtgggccccctataaacacaacagtatggtgtagccttcaaggttttattcagaacatgacctcacaaatgtatcttctctgtttgtttttgttcactgagcagtatattaattaatcctggaaaccatcttaagatccaagaaggtactttaggatttttcatcgcaagtgatgccaaagaagttaaaaggtaagagtttattttcaactggctttctttctggcccggctgtagacaccttgacccacggaagtaggcaggcttccataaccccaaaactccttaacatgtctatggccatcaactggtgtaagaaaaacttccacggactccagttcatgtagtgaattccacatctttgaatgagaataataaaattttagaactaggaagcctagttacctgctcatttattttgtgagggagaaaatgggggctcagagagctgaatgactgctcgaggtcatcctgattcctgatgattcagaacaacataacaagacaactggctccttatctagtgctctttacttaatattatctgggaaatttacttgagaattatcagttttctactactctccctgccaaatagaatttcaaaaggttgggattaatttcagatggaatatgaaactggctctatttctatttgtggcctcctaggtaagtggctgaagttgtcagcttcaattgttaagccactgtaagtgcagcacaggatttcactggcctacatgtttcatgacatttttattcgtatccttaaacctgtttaagcagcctaggaattcacagggccctttgcagcacaacatggaatattattgtatttgattctatcttatgaacttggagaaatttactagcagaaaatgtgatgcaaatgttcagacaggtcattcagctcaacagtaatattgcataaaatattttaagtacattattaattgtgaaggtctatcattagttatataagcctattgtcttcattgaatgagttcctagtcaaagccaggcctgttctaggtgtgctacattctttattgctgctcttcaaaataaccctggaaggtaagtcttctcaaacactcagagctttggtttcctcatctgtaaaatcgagataagtgatttgtccaaggccatgaggcacataagtaagtggtggagcccagagtggaactggtctttccttttctaaaatccactctctttctaccaaatttaataatactaccacattcttacagaggagggtttattacaccccagcactattctaggtactaggttctctgtatctaaaacttgttaaactctcacgcaaccccatgagataggtagcattactctttcccactttacatatgaggaaactgaggcacaacttggctaactaacttgcccaaagccatactgctagtgaggaataaagccaggaagttggagcttgcactcttaattatttgcctaggttaagcctgatacgctgagcacagaacgatgacatgtgaccgtggatacttagggtcctcttcctccccatccactctagcaaactaagccatactggctacagaagcttttgggaaaaagaaaacatgggctgttggaaggaaaaagaattcttaaactgagtgctctaataacttaaatttatttctgcaaattggggaaagattgccatgattgagttgtgggggaaaaatacctccctactcagttcacagaatctcccggttgttcaagagtatcctgagaactgggtacacctgagaagggaaattaggattaatgggactgaaccttccctctccctgtgctccaatcaggtctcctggagaagaagcttgtgcccttgtccagactgtgagacacaaaagcttgaaacagcatctcagcaccaagtacaggaggctggggagcacaggagaaccatatatcacgtatacctcccagatagcaaatataacatgaaactcccatttgtgtaattctatttcctattgcatctctcactaatgaatgtcacaaatatcaggccgtccaaaaaacaaattacctcctatattagggagtgcaatatgtctcatttcagtgctttatggtattcacaaatacatgctgacacaatcagctacaacaccaggctgtaattttccatggcatgtgatgtgtcaaagcaaatgctgtcagttaggggatctcaaatagatgaagactgcaaaaaaccacagaaaggacattggagatttgaatgaaactaaacaagctttgtaaaaatggaaaagtagattatgatgatctcgtatcgagtttgcaccctccactgcaaaaaagcaacaaaagaagttaatgaattctagcttgtagaaaccttcagatgcagtgttttagtaaatgaggagtgaaaccatcccactgcagtcttaagaaggtcacttgaggatgggcatttgggtacttgctctttcctccttgccaccaaatattttccttttaaaataacgttggaacatagactttaatataggagtcacaaaacggtggctcagtgactcagtttggcttgcacatatgatccttttgagtcacaattttaaaatacaaatgagttgccaaggtgaaaaaagttacgagcttttatataaaaatccttattactcatttctcctgaaaaattggcagacccaacaataccgggaagcagtctcaaactcactcattcattcgcccatcaaatgtgtataagtcgtttacatttagaaggctctatacaaggcaccagggaaacagtggtgaaaaatgaacaatggggagaagtcccaactctcgtggggctcatattctaggcaggaaagaattacagttttttaaaaaataattagtggtaaaagaattaatgcaactgggtcactgatttgggttgggtataagtgaaagcttctcagaggggttggtatttgagcagagattgagatgaagggaaataatccatcaggcagggatcagataggaagaagagatgggctgggaagaagttcattgtggatagggaccccaagaaggaaagtgcggctagggaatagatttggggagagtggtatgagatgaggttagagagaggcagaggctggctcctaaagcactttatagaaaggttggatctgttataaaatggaagtcattgatggctttaagctgatctgatgtatattttgaaaaggtcattcttcctgcattgtagagaatgagaggaatggggcaggagaagaggtgagagactcagcgcctattgcatagtttaggtgagagatgatggcagcttggactgacccctgagtggaggtggagagaggtgggttcccattcagactgtatttgggagagtgtgcagaaccccccaatgaattgggcagaagtgaggaaaaaagaggaatgaaggatgaaggctagagtcagggcttagattgtgttgatcttaaccaagatgagggatactagagaaggagcaagttttgggtagtaggaagttaagcattctatctgggctatgttaggtaggagatgtgtactaaacatacacacagtgatatcataaggcggttggatcttagagtctggagttctggggataagtgtgaattggagatgaatatgtaaatgtgggtgctgtttcttgtcctggcaagaaacagatgacaaacttaaatgggaaaaaggaggagagttttatgaagagactgtaaagttatgggcaaatagtaaaggaaaaccaacaagggatggccaagcactgcagagctagcaagaaaggggaagccaccttcaccctagatctgtggggtcaaggggaaggagggctatcaggagctggagagagaggctgtcgtgtgccatttcatagacctgtacaggagggcacccggggggtcaaggtggtgacctcatcccccctcaccctagtctcctgctgactccttccactggacacgcaggccaggaaaccagaggacaaggagaccatacaggccagccttgcaggacacaaagctggtctgatgatgggtgaagcaagatcaccagctgaaggctgcttgtgggaggggtacggtgagctggagcaagtggagaggagaggagagagagctgttttggagtgtgagaaagcaagcaacaggagaatggggtagatcccaaagagtggaaaaggcccctgaaatccatggttgtgggtttaaagtgaggtcagcatgttttctttcccagcgaaactccgttgctcaggtgcaggtgtgcagtaagggaggggctttgcgaggtgagcatgacagaggcaaagatgggtggggaagagaatgattcttgcaaagaaatgccacttggcagaggtcagctgagcttagatactctgcctgctccagatcaccatggacacccccgacccttgcctcatttcacttattaaccttaattgcctagccttggaggacattatgcttagtgaaataagccaggcaaacatcgcatgttcttatttacatgtggaacctacaaaagttaaactcatagaagcagaaagtggaatggtggttaacaggggctggggttgggagggattggggagatgtccatctaaaacatgaaatttcagttagacaggtggaataagttcaagaaatctattgttcaatgtggtgactatagttaaaaatgaattatataccagaaaattgcaaagacagatttttttttttttttttttgagacaatgtcttgctctattgcccaggctcccaggctggagtgcagtggcacaatctcggctcactgcaacctccacctcctggattcaagcgattctcctgcctcagcctcccaaggagctgggattacaggtgcatgccaccatgactggctaatttttttatttttagtagagacagggtttcaccatgttggccaggctggtctcaaactcctggcctcgtgatctatccacatcagcctcccaaagtgttggattacaggcgtcagccgccacacccagccaagacagtagattttaagtgttcgtaccacaaaaggtgtgcttcagtttctttatctgtataatgtatatgttaattagcttgattcaactattccacattgtatatgtatttcaatgtgttgcataccacacatataatacaattattatttgtcaattaaaaataaaaattaaattaaaaaagaatccaactttagttcatgaagtaatcaaactttatcttttcacaagtctattcaggcttattatcatgtcatcatctctttagtatagaccttgggctctggtgccaggctatgtgaattcaatctcagctttggtacttttagctgtgtggccttgggcaggtcacttaacttctctgtgcttcagtttccttatctgtaaaatagaaataataatcatacctccttcaaagggttgtttgaggatcaaatatgtttaatgcttataaaatacttagaaccacacctgacatgtagtctgttctctatagatgttagctatatgattgttaccgttattatcattatgtgttaagagcaacaaagggggagggaaaatggccaaaggaagtggacgcagagttactttccccaacttggatgctttctactttcctgttcttcctgtgccaaggcagattgattgggttcttagccacattgccactcagggtcaacagtcagctaggatttctttttattttttttttaatttttttgagacatagatgacagctggcatttaaagaaagagtggagaatttgctaggatagagcaagcattggacttggattcagaagtcctggggctggctgaatcccagcatggaatgactgggcagtccacgacaacctcctcagtttacagatgaggacactgagtcccagagatttaggctgcaggatctccaagacctcgtgtggatccaaaagtcttaacattggtttccaatgagtgccaattataaatcaagtcctgtgaaaacataaaaaggaacctaagaatcaaatggtcaagaattgtgtttatttctgcagccctggtcaagaaaaggccatgttcatagctggcattcagtttcctgttgggagtggtaaaggcaacaagccagggattttgttagttcttggatccagaaggttgtagggttgttccagtgaattttatcacctccccagtactgaaagggcacaggcctcttgtgctgttctaggcactgtgatttcaaatagtgcttgaatgatcttatttttcttatccagaatatctttgacacagctaatgcactgtggaatcacctatggacattcaagtcagattaggggattttctttttgagtgcttcatctcattctccttctacctacctattgcttcaataagctctactcacccccttccagtggtcagctgagctttgctccatagtgagaagaaaaccatcatttagtgcatgttctcagggctggatagcatgggaattggtccagtcagctttggagtaaaataagctgtgaaactccagagggggtttgacagaggaacccactgactcgtggctttcgtttttccctctctgcagacctcctcaactctgtctccctttggctgcccagaaaaggtgctttcagagtgacaagcttgatatttttatttgactgagaaacgacatacttctgccccctcaaatatatatttgaccagactgtgggaattttggtgttgtatttaacttccccaccaagggcccagggctcattgcccacatgtccccacgagtagcatcaaaggctgttctcaaaaatgaaagacgaatgagcagacacagtgtgtcacatcagcaacttttttcccagtttctttgtaaatggaagtttatgaaaaggagcactaactcaaatcacagaatcctgtgtttgaaataaatggtcttgcaacaaacatttccgtctgcaaatgtctaaacctttcaaaagattaaaggaaattaatgctggcgtgtttcattaatttggcaccaccgtggaggaaatgtggtactcatttcatttgggtggattatgaaacgtgtcagtttttccattctctttctccagggcatttttttactgcaaggcctgtcatgatgacatcacagatcccaaaagaataaaaaaatgtggctgcaaacggcgtaagtagtgtttctctccctgtcccctccctttctcattcctattccccaaattccttttccttcccttttcttattagagaaacactaaacatcgagagttttcttgagtatgtttatgtttcacccagcagtttaaagaaatatgaaataaatacctgtccttgctttgttagagcagaggatgaaaaatcaccaccatcaacacctaggaatgaaacctgtgcctagtccctgcttctttactctagaggtgcctcagtagatgtgtccagtctaacagagacaagtatgatgtataataaggaggagaactaaagccacagagcacaaagtgtttttgtatcgtgatttccagtggattgggggtccctgagtatatagggttgagagagaaactaaatctgaggacttggtctccaaaatgggagttgactctttccatttggaattcctgctagttttaataccacaggccagagttggcaactgtgataccttcagactgcccccaagaaaagaactttccactgccaaagggcttcagttgccatcgtccaaaggtcgacctcaagcatcatcgctctttggggtagactagactgggctcagttgtttctggcatattctgtctcaagtcccttctaaagcagtttgccactggggcctcttgagaaagatatagtgagtccagaacgtggaattgtgagctcctgagataccatgacttaagtggtctttgctttgagaaggttgtgccttttgcagtaattatgctgtattgcctaatagaaattgttctcaacccttgaaaaacaaacaaaaaatgatgccatccttcctatggtgagttagtcttttaaaagctccttataatcattgctttgattctcaccctaaccccatgtaattggcaggggtgttattaatcccattttacaaaaagaggaaactaagcttccaagtttgagaggatgagattgctgacagtcacacagccaacatacagggatttgggcacacctgaaggcctctattgattctctgggtgctctaacatttttttgcagaagggaaaggcaatgtgggcagtcttgggtctgatgagtaagaacaattatgaaagagtaccccataaaatccttgttcacaagcagaagccagacagaagagcaccattcctaaagtatgccactgaaggaaggacctttttcattgtactcctagagtggggtacagaaaatgtagaaccagtcatctataaatatcactctgctggagggtaaagaagttcctcaacccatggggaaaattcccttggggtgcactcttggtctagagaagtttctgcagaaatcccctcagggtggggcagcttaggaccatgggtttcctccccctgtttccactgacttaatacagctggtccccttcccccagactcttatcgagatgagtatttattgatatctcaaaacaagagcctctaatttcttgggacaagaattccccgattctgacaacctaccgagaagagcatctaagagagaacaaggcctagaatgaacctcactccccattcaacccccacagaccccatgaatccaaagaccttcttcaccaggcagtccatcccagccatgcttagttggttgtggacacagcagcacggatgagttgaccagacatctcctgaatcatttcaatcagaaggagcacagcagtctgagggttgagggaaataagagagaacaacaaatacaagaggtgaacacttctgtaaagaaacgcttgtagtgaggggttgggaaagggaggaaaggtgaggccaataacccctgacaggatatttgccagaccctcatcccacagagtatcaaggaaatagcaagactgtgattcacatattgattagccgttcacatatttttgagtatcttctttggatgagctgctatttttggtttcagggatggagtggtcaacaaggtaaagtccctgccctcctgaatcctttactctggtgaatggagacaaaccatgatgatgtaaataaataaattcagagatagccagtgctaagaagagagaagagactgcctgagggttgaggaatcctgcagtggtgctactttatagcttggaaggtcaggaaggcctcagtcaggggtgatgttgaggccaagacccaatccagatagggagacgagcaaaggtcaaggtcaggaggcaggaataagtttgtggtgtttgaaggatggaagaaaggccagtggcactggggaaagggtagtatgagatgagattagagacggagacaggggacgtggtaagaagtgtgggttttagtcctatattaggaagcctttggaagattttaagtgaggaaatgtcatcattagttcttagtttaaaagatgtccctggtgtctggatggagagcattctcgggaggaaggagtggaagtggaaggatgaagtgagaacttctctgactcttgctctgacattggaatgtccctcataggacgccatagtggaacacagcagactaaattgtccctagaaataagaaataaggatttggcctctagggtatttttccaccttggttccagacaggtaaacagcagcaggctttagcttcatcctggagagagaggcccataattgtttgaaataattttcttctcttcatttcctttaaagttggtggagctagtgaggtatataatctcccattatgcactgcaccaattgctgcaaaaggcctgcctctacaaagccaagccagtgtaacaagggcctcgcttccttctctgtacatccctgtgcctcctcccccaacctcagcttcttcatctcacaaaggcctttggctatgtaacaatcagaattgtctgaatattgctcctactaattaaaaggccatagaacagagggcaggatgcagatgtgtgtgtgaggtgagggggtggttagaataaaatgaattattaaaaataaacctccccatgtaggtcaggcaagtgaggaaattggagaagatgttttagttgcaaagaaactttaattagaagaaactaggattattagtaacacactggggggacccccatgccttcgaacagacattgcttggttccctctctaagttggagaagacagctgacccacatactcatctgtccaaacgtgttagtccaggtattaataattcaccctggaatggtagatcccatgagggcagagctcatgacagtcactggcccttacccatagcttcctaaccctccttccccaacccagccttcccctttcacttccacccctagctcctcattcactttcattcagtaaccttcaacatttcacgtcatctcatccggagaaatatcaggtgcggacattccatttctggaaatcctgtgatagtatagtttaacgtttgcatttctttccatttcttcatagctctctatcaaggaaaagagtcaaattcagctgtctggccgaggagcaagttctcagggtctactatttactcattttctttttctatataacaaaccttgtctaatgatttacatttcttcccccagactctaaaagtttgccaaagtgtggactcctagtggacaagtaatgtctagtttgatgtgtttgaaggaattttctttgacttcaaatcattgacatatctttgatttattttttttctctttgctgccttggaatacggcccctactctattttaactgcacactggtagtgatatattgtgagtaaaacgggttcccagcagcccggagtccagttccccctgtctttctctagaagagatactcttttaattttctgtacagttttagtttcccttttacttttggtatttatgttgcatgtagcagtgacatcatgccccaactccttcatcccccaatgcagtctacagagtagcctggagccagagagtccccagggagcctgctctccatccatccaccccagtccccgggctctggccagcttcgggcactgtcttatttttctatttgaaaataagaccttgacaacagtgtgtttctcttgaaggccttgtctcaggacttttaagggacactgattaggctgaagtaattaccactataactccagatgcttcatcagctggggtaattgtcatgcttgcctttgataaattatacttggtctcctttgttattgagcttggattcctctcctaaaggaaacacatatgccacatatatattcccatgttgtgatacatatatatatatatatatatatacacacacacaatatgtaccatgatgtatcagagtatatgtacattcttatatgtaaaaattcatatttttacatataagagtagagatattccatagagtgatgtatttattgcagtacatgcttctctgtatgagaagtgcttgctagataattaattggttactcaactttgggactgtaagtatctcaattgtcttactggagacaagtatttgcacagtggtaattattatctgcagtctatgaagttcccttgctttacaacaaagtttttcttttagtcagtactcagtaggacacacccagttgctttatgaatgttagtcagacatcttggaagatccctttacctgtttaaggcagaaaagctgactggaggagaacattccatttcagcaatgagcaatgtataagtctgaacaagtcaatacaagtgtctgaacctctaacttactcaaggaataggatgcccttttactcaacaagatgtggccattgaggaggagcttttaaggccagcattgagctttgggtctttattcatgtttgtaaggctctactgaaaaggagacccaatctgtggaacagttcagtccaatggctctggaatttggagaagatgtttcaaattcagtcccctcattcctttgcagcaaaagaggcaagttgatcatctgattttggttagtcatcagtgtttggagggtatagattgctcactttaaaaacaaaacacaatgatgaccttcttcaattcaatgcacagtcttgccaaaatcgactctgtggctttcttcatcgacagaaccctttaaacatggcttgagggcatggcccactttcatacctgcagagctgcatactaaattgaatggtccttcagaattggagagaaaatgtggtgtcaatcaaccaacaactctagtgccaaatacttctgccttcctcagccacaatacagtcattaggggcagaatcaactagctcagtgtgctctgtgctgctgacattaactagctttttctttctcctctgtttttggaaaaccacctggaagacctttcttcttactccagaaggtaatgggaggaattttgctaagtgaagacatcatttctcatttataggacttgaaagaatattctctgattcccagtgccacatcaaaggcctcaccttaaatcctggtggactttttcttccgtggatatttttattagtaacgttagttgctgcagagcccatgaagagtagctccatgtttcttgcttggaaataatccctccttcatttgactgattttaaaagtgaggctgtgacctgaaaagtatctattgattgaatggcagatgttttttttcttccatcccagtcttcccttgaatttgctccatttgaaatctaaaacattttccccagcagttggaaaactccacctgggcccctcagtccagtactgctttttcctgcctcttccaatccaccctggaaattaagattctgcattggaaattggctgacaatttggttgctgatgcaggtggcagatggtgctgaggataggatggaatccaattcttccttccattccaggcttggctcagaaaggccagccagcagagaacctgagtttgacagctgattatccatttgactcaaggaaagagcagtaactgagctgcatcttcaccagccactttccaacaggtttctggtctcatgatcatggcctttgagaatagaggaaaagttgtccaagaacacttctgagaagcctttttgttttaaacactcaagagtaaacaaatagttttgatgatgtccattagggaaatacttctattttgtctctgtaaatagtactatgaagttatgatggaaatgttggttgaatatccacttcactgtggtgaagaaaagcacataaaagctttttctcaaattgtgaaactgccaggacctaggtcttcggaggaaggtgagactcagggtcaaattcttagcaaccacataacctcatagaatccatggccctggtccaataacaagaaccttatgatgtgaaccagagggtaaactgagtccctagagccttgtatttctgctttcctagagttaagttggcctatcggggcagttaattgagcatgaagtttcaagagccctaagatggaatgacaagtagctttggtgttcacacttgccagagacacactcttgtctgctcccagtctcaggaagctgcagcagggctttaaaaaggagacgcagtcagctgccactgaaatagtcctcctgtgccagctgtggctgcagaccctaggctcatctcctaggacctctcaccctttcactgcccctacccctaatcatctgctgtggatcatgagaagccattgaattgaaatgacactgcatatatttcaattctcagagacagcagggtcctctttctgctccttttggagaaaggctagttccaactgcccatgaactagctgctcttccacattgatccactagatgtcctcatagatctactttgtattaccattgacatcctggggaaaaccttgtctgagaattgggatttgggaagggaacaatgggtgactacgtaagaaagaaaattagcaaacaccaaaggagagaggatgctttgtgtggccagggagtagataagaaacttacttctgtttgaaataaatcctgaaattttcaaagttgcactttgagacctaaccttgggaatttaaagtggaactcttcatatctaaaattaaccttctaacctaaatcagctctagaaaaggaaacagtcactgagaaatggaaacaaaacaccagtggttctgaatatccatgattcactgtaacaaaattgaagggttaggaagccagagagagttgagagagatgaggggtggtaatttccaaattaggaggtccatgacttaactttgatataatttaattttacaacttaagagtataattttacacagagagtgttcaattcttctggaacatctaccaccagggagacaactcctcatcagcttttagttaaagagtttgttcatgatttgtataatggcccagaggagagctcttcctggccagtactcatatccttcaagcctgatgaatcgctccaccagatgggaggtcttaccttttaagaaagtggacccagaagtctctaggtgaagatacctgacagggagtcaatggaaatggactatgccagcagtagcgaaaaagagccaccttcccagttggtggcaccttgatctagacattctgattcatgaaggtttgtcaacatgtggggctcaatagtttttaactgtttctgtcttgtctttgagcctctcattgatcgttcttgctgattttgtgtgtgtgtgtgtgtgtgtgtgtgtgtgtgtgtgtgtggtggcacttgtttgtcttttgagatttctattttgcatttggtgtgagtgtaaaaatgattgggaaggaatgacaagtaatagcatgttttcttttttatgcatatgctgctttggaatgtgactgcttataattaacagttaatcttcttatagcacatggttttttgctgcttcgattaccagtttcagcctgttcctgcatgctaacaataagaaattttagaacaatgcatggtcgccagaacggctaacaataacagttgcaaacagtccctgagagccactggtttgtcactgtgtttcctcctgaactcatatcaaggaggaggtttacatcacccattctgatctgtttgcctctgaacaaatagtttcaaaagttatttcatccccatcatccctccccttatccttaaagacggtatatttataagaactttctttctccacaaatgtgtcagattctattattgtacataaacccaaaatggcagtatggaaatgaaaaccagggaccgttgctaatgagaagcatagcattccagagtttgatgggcttctcttctgctacagcatttgattaaaaaaattgtttttcaaaatgatttatctacggtgaagcaaaaaaatcatccttgtttccctcttctgtgtaaataacaaatcaatatttccagtaaaagaaataagaaagagaaaacaagggaatgtctgcagattgtatgccagatccggatgcatttaagataaatttatgttcatgtctttaattgaagacttttttccctttcttgacttcagccgttgctgtttgtttgggatgtctgggcattcacaccatgccttctaaattcctctgattcaaatgctatagtggaacttttttattttttatttttttttggtaaaagctaaagctcaaaggaatgatataccaccattgaacagggctggggctgcatgatgatctgaacaacagactagctaggacactaaaagaacacgtcactaaaaatgtgagccaagtttacaagaatggagttgctgctgaagagatctctcattcatctcccccagtgcctgttcttcacaatcataacgttacccttgcttgacaaatatactgtatggcaagtcataaaggtcttagaacaggacttgacccatttgagagatttaaacccctcttcctggtgactgtaacattcaaagagggcaaaaccacaagccatattttaaaataagagtgcaaccattctctacaaagaaaaagaaagagtgggggaaatgactttcaaaatggaaggtgtgggtgcagggaataacacctcctcagtttaggtttaccatttggcagtaatgcttagaataaatgtgaattcttctcccacctcgtgagagaagcaggccagttcatgataagtgataagcaaacatgtttgcctgttgtagcatcaaaatgaggtacaaaaaccttctcttgtactgaaatataaattggcttgaaaggcaaaggtgaagggcattggaaactacgatgctgacttccaacaacttttataggttaccactcagtttggatccccaggcagtgcagaacctaccataccagctttagaagagctatcaatgctgcatgcaaattgcattaagatatttcacgtggaacctattcttctatttcatgttttgtcagttttaatcgattttggcgaatattttctgtataaggaaaaaagaaataatatgattaaccaatagcctgattgcttcctgaatttctatttggtggggagagaaaggcagatgcgattttcagatcctctcagctttaagcagaaaatacacccatgagtagctaaatgcattccaatagagcaacatctcatatgcttttggtgatttcttatttgtgaactgcctttaatgtcaaatctgcagcgttagtcttgagtagctgcatttcttatatggacagatttggatatttgttctgtcaagagtaaatttaaattcctgtagccatcatataaactcactctcgggaagttcagcaaaggcatccttagatactgtattaacacgtaatcgtttcacatctaatttgatgaaagcttgtcccagcctctgcctaatgcccagaaatggatggaaattagaaagcctacatattagatatttttgcatcttgcaaaaaccatttattataccaaataagcagctaatttcattgattggcagtgtgtatattttgtcctcctgtattaatcatatcaggggaaaagtgttggttacgttttttgctgtcgataatttgctcttcttcccatttgagaacccgagtgtattcagccatgcccttttcctgtggtcaccgctttacctaggggagaaaaatcatgtgcaacagccttgggagacgataaaggcaatttatattttcgctgcttttttgatgtacaaccaaactgttaccaacaatcactctgcatttttttctgggtcaagactgttaaagtgaactaagacctgtgttaaatcccttcagctcccttccagctgccttgctgtgtgtgaccttgccattaattgccgctcttcctctcctcccatccaaccacacggttatagccaagatgtccatctacaagagaatgagacgggcatgttgttttgattgcggacgttctgagcgtgactgctcatgcatgtcaggccgtgtgcgtggtaacgtggacacccttgagagagccttcccactttcttctgtctctgttaatgattgctccaccagtttccgtgcctgtaagtttaacctcaacacacgtagttccatgtttgtgctgtctgtggtatcatccctgtcttgtgctgtgccctgtggttctgagtcagtcgggctgatgtcttcttcccagtgtgaactcctgtgtgctgacatgttgccccagctgcctatgtctctgtgtacgtgcctaggaaggcctcccttctgattttcttaacttacgcttctcgtaacagcatgcaggactgtgatattacagtctggtgatatctttcctctctctcctttaaataaatataaatggaaattaaagtgacagcatatcacctactgtattaatacagagatatgcagaagtgtacatgttaatatttttgaaatggctgtaaattgaattgtatcaaagggaggaaggaaagggtgtagcgagaacaagccagctctagcattgaattgcttttagtgagcttagatagtttcttagatagtttccaaaatacaacagagttttgatgcagatggatatatatatatatatatatatatatatatatatatatatatattttctttttactatgtctctctaacctgtgcctcattcctccagtgccagattttgtcttttgttctggaaacgagttttctatgtctgtcagcctgcactgggctagtggattacagagctttttctcagaatgatgactattttgaaggactgttccattaatatcttttatttttccaatagtatagcccctgtttaactaaggtatcttgcagcaattgtgattccaaatgccaacaaaaaatttaagtcagaaacctctgtgatatccctgagtccatagcacaggcctctgatgtcagtcttctttgtcatccacaagctcagagatgttaaagaacctgtcaaggctatgcagctggtagctggcaaggctgagatgtgccagtttcctgagacctcccttatccttgcttccccatggactttgctgttttcctgatacggttcataagtgaagttcctgaaagctccagtttgagaccctgggactgtgggtcttggtccaagtgcagaaaaggctgtggttccactggaggactttacttgaagtataactataactttgttttcatgttttggtagcatagaaggtaggagatggttctcgtttctgcacttcctcccttcctctttaaagcagccaacacatatattgctaacctcttgctccctgtcctctcaccttccaagtgctcagagctggttgagctacactttcctagcaggggtaggtgtacactgacgacaggaggaagaagatcactgagctcttaagcatttattcccatggaaaatgaactggcttgactcccctgtgctggtgttgaggctggtcccagcagagtgcggctgtgtagccgggatccatgaggcctctagggctcagggaaccgggacttcactgtgtgccatgccaggtgcttatgtttgggcccaaagttcaagtgcaaagcatgatttgtgcatcgagccatattagaggcatttggaaaactttgatctaggaccagagagtcattctctctgattcacgatttcctgctgctccagagcagtgccaagggacaggattcacttcaaagtaatacctaatggaggttgcattgagagggagtgtggactgccatatgggcctaaaatcttggaaagatttctgttacaatccttagatgctaccatatgaatccttatcactttattttcccctgaagagttatctgtagtttgcatgccattacagagataagctagggcacagctgcacagagaacttgtctgtctacgatgtgcagcaagacaccaagttcaaagataggtgctggggaggaagagcagaggagggcctgaggtggcatgaattggtcacatctctttgactgatggtggtgaaagtaaccacaagcccccgggttactcttctgcctaatgcacaacttctgttctcaaataatcatgaggctctaaaaccttagcctagactcagtggagaaaagaaaggagccactctggctctgagctagggccccttggtcatgtcttggcactggccaacaataccaatcacagcacactctgtgtcccccatgtagaccccatggtgcccagtgtgtgtaatttccattatatccaagagaaatcttaattagagggatttctcagctgtgcaatttaatccaaccattgatggagaccagggagaagaaaaccttggggtgggattgtcccattctctaagaaacattctgtgagtggcatgttgtccctcccttgcctccaaaatcagcccccaccagggaacacgtggagctttgggctgcgtgttgaagccttaactggtattgacagctcagggggcgatttgccttctccgtttcatcagtcgtcctgccgtcatcactccatcaaacaaaagcagatttcatccatccctgtgtgagaccactcacctttgaccattaataataagttagaaaaatccattccaatttgagcccctttttgggcctgcataagcccttcttctccaattataaaaatgtctgtctctatgtgaaattccactggcagtgctccaatagcaatccccaggcatccctcgctggtggtggagttgggtggtgcccatttgacagagcaagttgactcaagagcagtggtgagagtgggcttttcattaaatatgaacagatgtgaaatgtagagggtttgacaattagaaatggcaggagaagggcccttgaatcaaagtgaggtcagatgggcggatcagattacttctcttacattctttagttgttctgaaaatcattttgaattagtgtcagcagagccatgatgagttttgccctttgtcttttatgctagggctgtattgtttcccaagacactcattaaaggtcattatactattatggagcttgctttggtcgcagtttcccagttgagccagtgtgctttggagactgcctaattcatttctctctttcctttcgtttccctctttactctattttttttcttataaggggaaaaatttccgttttcaagggatgttaaattgaaacacaaagtcccattatgtgttttgtgaagtgggaagagaagtagctggttcccagaggaatggtaatatattaaaagtgctcacacagttctgaaaacctgccttctaacaacaggggctgcctgctcggtgcacccctctatggaggtgtggcccattactgtggatcggttgagtcatgtgctattatgatagttgtcttctgttgaactcaggaggagatggaaggccagactgtgttgaccaaaagaacttcagaggggaaggactagtttaggaaagacaaaaatcaaaataaaaggtgtcagaaaagtaaggcaaattgtgaccgataaggattcatcacaaaaggattttatttctggcaagactgaaatgttcaatatggtaggctagaatcagtgcatagagtgtcattttatgatcatcttggttttgtttccacttcagatggtcctgggcaagagtcccagctctctcaaaagacatcaggatggtatgggcctcggctttttcacaagtagctgtgttctagtactattaaatgtaaaaaatgaatgtctagcaacatacacatgcacataaatatagaagtagattccaatcagtacgatttcttcccactataattttgtaaaatggacctttctctctctttagaagtttattcttgttatttcagtcttgcctgctatctgattgctaaatgtaatagaaagggacaattaaaattatgatgcagtggcaacgtagggccatactgattcagacctgctgagacctgcctgacatgattctagtcacaaagcatcagtaactctggcacaaacaaattaatcctgtggtagaagagaagcagacctttagacttgcacttggaaccagctttagctaaagtacatgtgtgattgctcacaccaacctttcaatttactaattgtttaaacctgcacaattacatgcagccttttgcaaactactgtagctaattttaaattacacatgacttttattttgggtataaatataatacaagaaggcattcaactccgatggttaagctgagagaagtccaatatgattaggttgaagggagacgtaccaaaatcagtttagtgtaatatcgagtcttgtcagataataaacaaaaatcagcttatcctgagtagcctttggtttgtgcagacagagaattaacattgtcaatagaactaaagtcacttaagtgaactaatggcattttgaagtacataaaatcagatacaagggcagggggtggaaacagctctaggaaaatgtctataataggacacaccctatcctgacagtctccaacgcctgttaaaggagagttaatttaataagctacatttaaaaatcaacagcctataattatctcattccttttatgtgcagttttaggtgacttcctcaaattccccaaacctaaattctatttgcttattttacttctgggccctaaaatcaattactcccctctttccaccaccactaccagtgagaaaaagacagaaaaaggagagccaaggataataagcacgaatcgatgtgatcatagtttttcatgtattagttttaaagcctgttcgtctgagtctccattttctcccatcttcccatgcttgccgtgctgatgtgagtgcgctctctctctctctctgtgtcaatatccatcacacatgtgcacaccaaacactaccagagcctttgggttgtcccctggctctttagttaccctggcccatgcgtcttgatttgaccctttgtacttcattgcaggaagtaaaaacagagtggcagatcggcctaggcagccactgggtcatcccctgtgactaagacctagtgatgggcctggaaggggcttcttaagacactcttattggtagcaggtgaggctacagaagccactgcctcttgcttgattttgtgatagccacgctgagccataggttgactggaaatatgccttactgtgggccttagctcactctgtgcagtgggcagcttcttaaatcagcattgtaaggcagaaatcatgcttgggcaaaattgcctttgagaaggatcctttacatcgctcatctgtcaagagctcccaacacactgggttcttctccagaataaatagctggttgtttcagttgagtgtcaggtaaagtcactggcttgtatttggggaccttgttgtgctttcaccaccttccaaaaaaagagtatggttgaattcctgaagatgaatacactatgaagatgtactgcaggtagatgaaaggagacgggaacagtaggcaaaaggcagccaacttctcaaaagaaattctttgaaacaggattgggaaacaagaaggagaaaggtcagaatgagggaagctgacagggtcctttgtgtataccccatcatgggacacctttcttcccagggacaccatgctgtaataaatgactcggctctttaaggacaaactagaaaagatgttggcatgcctcatgtaagcccagaagaggcccttatgcaaggtgacatagaaattatgtttgcttttttatttcaggacagtggccggttctcaggatactcatcctgacagcttctaccaccaggcagtgaatgcttcctcttacctccatggtggagggcagatgtggccagttagctcctcatcttccatcctcctccactatctcaggcgacagatgccagggccagcccgccttccacttgagctttcttgtcaaggctctgccttgagcccaaatcctgacctttactgtatgaaataaagtactgatgaacaagcagaggtttgaattagagcaggcttggagcaaatgtcaagtccgtctctgcctctttcctccacctgcaccaggagcctcgattagacccagtgtggagtttgcagcgccttaggctttatgggtctggggagacataacttattaacaaagagttattaaatttttatcaattttacaacacaatgtaaatgcctcctatgaatctacattgtattcattatcatttaaaacgttaattaagtcgaagttgcatttaatttctctctaaatgggcctctgggaagacgcttttagaaacatctgtgggagcgtgcggctcacggagctggagaatcccccagcccgcattcaggatcgccccctgagttgattgctatcacgtgtctgtggctaatttgttgtgatgtgattgggtattgtctcaaattagtatcagaccaataatggtgtgaagtcactcgagagaggcttgtggggcagtggcacaggcttcactgcatcctgccttccttccccatccagacagaaacggacagtgggtctgcagcacctgtggtttccatcatgccttgggattctccttctcatatggtgcccatcatttcagttggatacttccttcatcggagatggatgcttgtcatctggcccagcacatttaggacatttgccagcatgctcttcaaaacgatcttaacatttgggatctttgactcccagtgaagcctagaagctgcaagcacagagcagccaaaaatggaaaccagaatggagtggacctagtaatcataagcaggtcatgctcattggtgaggagagacagagggaggcatactaccaacatttgctgaaaaattatgtttctcttttgaggctagcatcatgttttagtcttatctgagcatggggtcactccccaaagagatctatattctgtgtatactgcatcaccaagggagtgagacttgttgacacagcattactaagaaatggctagttggttaacttggattcatgttacgactagaattagtgtagtctctactcttactgtgtgcaagcaactctgagtacacagggaggatgtgtgtatgtgttgttgctgttgttaaatttaacacttatatagcatttgctgcattacaggcactactccccctattaccacaaatattaattaatttaacccttattatgtggtaactgctgtttgcagttgaggcaactataacctgagacatctgcaatgtgccccatttacagataaggcaactaaggcacaagggtctcatagccagtgagtctggccaagggtctcatagcctcatgtcacagtctcatgacttgccaagggtctcatagccagtgactggtggagctgggatttcaacacaggccgtgtggctccacagagtgtggagtcggttgagttgctcagttactcttgcagttgaatatgatggataagtcacttaatctccaagggaggagaaaaaagtgaggattctggtaatgaaacctcgagataatgtagagagtcctgggggggcctcctgcacagcagctggccacccaatttggctagagtttaagacttacttagcatgcagggaattgacccccctgaagggtaaaatggggccccattcctggcaggggccaggccaagggttttgttcttagtctgtaatatgatagaaagtctttagacagtgcgacactatcatattggtgtttgatcagggaagtgacctaacagaggctttgttttgggagggctgctgtggctgcaggggaggaagggactgactagaggggagctggaagcccccctctcggggaggagacaaacagaggggagcctgttgtgggcgggccccagctgttctgagaagccttcagaaggaagacttgatctatagtctgcaggaccctgcaggtgaagcacattgcccagatgcaaatccaagaagttacagtctttaaaagacagtttaattagtggctctggagcagctgaattccatgagcctaattctccccagctgacctggcagccattgtgattcctagctgggtttgctagagtttccttcttattggaggaagatttcctgacccctgacccaggactaggagacccactcggctgcatccactaccactggccttggggatctactgcttctgtttccttttcctaaccattatttcttccttattcctcatcatcttccccagttcaaatatatcttacatcttgagtgtgttgaaggtgacaggcaggcagctctcacctgctggtgtgaagtattggctcaggctgagcagcagacacaaagcaagtgggagccaccagtggggacagctggccagcgctgaggctcttgcttccagctgcaggtggtagcttcagttagagctcatgggaattattctttaaatccctgtatatggcaaggagacttttctcctcctttctcaggaagtcagcatgtctccttacatcgatggggggaaaataataaagtgcttcacatcccattcactgaaaatccactgtagttttcaaacacttaaccttctcgagtggaaatacaaaacacatttcctgtgaagtactgccacacagagtcctaaagaagtcatgtggcatttctaagtatcatgcacaattttcttttcggttttactgctttgtgcataagacctttgtctgtgtccttacttatgtcagcatccgtgattgtggcatttgtgtacaccattgacctcagggggtcattaaaactgcatggaaaagcacttgagtcctgggttccctcatggtggtaggctgtgcatgctgagaatgccaacttctggaagtgcaatgtggcaaaatgcaccaagccaaccagctgtgtgttgtccttctctctctggggctttctcccaaaccagcttgttgaattacctggatagtcaggggaccctccatcgccacatctgcttacaggggttctgcttccccagctgacctttttcccaaagggaatctaaatggacagagctaaatccagcattgtcagacccttgcatttgaaatctcagagggaattgcaaaggcctttctgtaaatagctagatagtgcctgctttggagggagattgctacacatgcccacagatttttattctgaggagacattcttttgatgtccagctcagatgagcaggactaacaaaagtggcctttcttctcagaccatctcatttggtcatcctcagggggagctaatctctcatattcaagggaaacagcaagaaaaaactcccccagccttttctagtaaatctgaaagttttcattctagccccttcaataccgcaagatgagtcccaccaaatgttcctagagctgcagagaaaaccctatgcaaatagaaaatggaatcttttgaggcagatctgcattagggatgatcgactgcactgagagacttataaatgaagtgagaaagactccagccctagagctggcactgcaccagctgtatcgacagtgcatagatgggcatctgcacaccatagagcatgggctatcttctgggaagggagctgactgcttgcattaaaatgatcttcattttggccaatgtcagctttctgggctggagcctgttggatcacactcagtcaagaaaggacccaggggctgccttccctccctccaaggtcaaaaatgtagcatgctgacatccttggctgggcttcctatattggcaagagtacttgaataggaaatggcctgaaggattccagttcagtaaatatttcatgagtaaaagaatgaataaatgaagggcttcccaacccttaaaggaattggtgatgtgctagaagccagatcgccctagatccatgaagcttcccaaaactttctaagcagcaacttactatatagtatatatatgtaaacataaaaaactgggatgtacaagaagagtaagagggaaaaatgtagtaagaaagaacaaggacatgactgaaggaactagaaaatgatcaaatggcaggtgcaattgatattctttgtgaaggataaattatgggaaagaagatctggaaacaaagtaccagaaaaaaccacataggcaaaaatccaccaatgcttccaatgaggagtggcagggttactaccacatatagagcatttgctctggaaaatcaaggacttgtgacattcacattcagttttattaatttcagcaaacctgattattttggtgtgagtcagggcagcataaaaccaatgcattgggcagggctcatgtgaggaaaggagtctgttgtagctagagaggtgtcagcatctgcaggtgggcacatcaacctgcccaaatgtagagcaacattcgaggccttttatggcggtcagggtaatttgactctgactcgaggtaggcagcttgaatgcaacagcagcacccaaatgattcctcccgcgtggaggtatccaaaagctgaatgtctcatagctattacctattaggagccattattctgtttgttctgctcaagccaaggaagagttttcctgattgttctcaaagctctctcaggctgcaccaagcattcccttacctttgaatggttctgaaatgctctctgcattttgtcaaggctgatctggccatttcttcagtgcagatgagtaaatttccacatatggcctgtaacgtatccaactgagagaacatatccagcagggatgcttcaaaaccaaagccctaaacagatgttactgagaagggatgcacaatgacctgcagagaagagagatgctaggtgaaaataaaagctgcaactatgctaggaatgaagacagggaggaaggggctcaggtcatgtcacagggtctggaagttagggcatgaatgtgaaatttgcaaggggctggttgctggaaacactgctccttcacaaacatcttctattaagatgaagatgggaaacaggcagacatctcctgtatttcctcctctctatgttaggggattctgatgccattcccctcactgtgcagtgaactgagagatcttgttggcaattacagcctgaaattctaggaaacgtcagagcaggcagatacaagggtgagatctgtgaattttctggaaactttggaagtaagtcctggtgaagtcatgctttgacatgttcaccaagtagatgctcatggctataataagagtaatgtcttatgtgtgtttgagtctttgtgcttctcaaggcaccaacatcatctcatttcatctaggcatccccagcatagacatcatgtcctactaccatgtgactttgagtaagttccagaacttcactattttttagcttcctcatctataaactggagataataaggacctatctcacagagtggttgcacgaattcagtgagtgaatatatataaagattgcctggtatatgttgaattattatttttatcatccttcattaacatatgaaattaacaaagaaacagagatgaacttgaccaagatcacatagcggatgagtggactgctagatcagaagcttgccatctcccatagtattgatggaaataataatgataagccactttaaccataactagtgcttttttttttttcaaatgactgactgtcatcaagctagccttataagaggtcatatcagctacaggcagagaagcccacagatagtggctgagagttgaacagcttagtataacagactataaaagttaaatggagtcaatttgtttaatttctaggtcatggaataattgtcccaacagaaataagccaacaaaaataccaagagacagctatatctccccagaacattgatttccatcttgactatccagtaggccttgcaaaatttgtgtgtaaaatgaggaaattggaaggtcatatttctaagtttcctttaaactctgagactctgattatcttccttcttctgattgagaaaggctaaaagtcctttttgcttcaatccttactgttataaatccttctaaaatgctgatgtctattacccaacatcgtggtaggtcctgtgaggaacaattatgtgtgtagaaacctcgtagtatatcagtgttagtcttctgtctgtgagttcgcagcttctagggcaggaactgggcgcacagggacacaccgaaagagcccagaagattcttacaggtttctactttattgtcagcttgttttcttccaaggtgtcttttattttcctcaaggaaagcacagaaaaaggccctctccctaacccggggtcctggtattatctatgctccagtgatttgggggttattagtaatcagaacattgtcagctactgaagctatcccagaccagttcatatgcagtgtctctacaaatggccctgccctcccacaatgaatgctaactgttgacctccccaaagagcctcctcatcatatttgttacaccttgttttgttattgccaggtctccaggaatgaaatcgtgtagcaggaagcatatagggccaaacggggacaccatctccaggcaaaagaggcttcctagttggaatagtacagatttgatggatgaaaataaatgtgtgtcttagattttagcccagctgttagaatccttaggtcctgggatcattagaaaactgtgacttcaggtctcatcattcctcatccccctgaaaccccttctttatggcttgtccatccctaaaataggtctggagatcgtcagcaaattcaatgtgtttttgggagagggagggaaagttggaacacaaaaagaggagaacagatggggaaagaagacattcctgtcctttcaaattccatcaaaatttcttttttgatgatggtcttgatctcaactcatctttttctgttgttattgttgttttttgagatgggacctccttctgtcacccaggctggagtgcagtggtgtgatcatagttcactgcagccttgaacttttaggttcaagcaatcctctcacctcagcctcccaagtagccaagactacaggcgtgcaccaccatgtctggccatatctttgaggtccagttggtgttgagacttcacatcatcacctttcctaccttgctttatgagtagctgggctctgtttcttgttgattttgtaattaattagatgagtgcttggagcaaggccaagactgggcccaagtttttcacccatgccttaccactatccctttctttcagcagacctgatgtgtggataggtctagggatgagtggaatgagtatcaatatgcacatttgaaattctgagttttaccctgtaacactctctctttcctcctaccgatggccaagtcctctgatttggcctccagattacatttcgaaccttttctcaccattgccagtggcactgccaagctcacatgctcatttcttcttcagctagtctgccattgttgcccttcaacctttcaattagttcctcttgccaccaaaccaccaccaactttagtattctaaagcacagactttgtcatgttatcccattttaaagagagagaccttttgatggttccttgttttttaagaggataatttccaactttctgctattaaaatggcattcaaagcctttgcagtttggcctcaaccagtttccctagttccgttctccacataagcatccatcatctaacaattctctagaagcgtcttattctcattactttacacatttctggaaccttttcctgagactgtgattcttttcctctctgcttctagcagattaaaacttacccatccttcagagcaggggtcagcacactgtcccatgggcccagtctggcctgccatccattgtagtaagtaaagtttccttgtaacatagtcactcccattcatttgctcagtgtccatggctgctttcaggctacaactgcaaagctgagtaattgtaacaaaaagggtatggcccagaaagctcaaaatatttactatctggccttttagggaaaaagttggccaacctctgctgtgaaggtacagctcaagtactgccatctctgtgaagccttcttaactagcccacccggaaaccaaattagaaaaagtgaatctcttttctgtaagcctgtaacatttcatgtaaaccccattagacagtttttatgttgaggtttttgtagaagtcaaaattggtctttgaattcttagcatattgcacacagtaaccaagacacacagtgtgaattcaataaatggctgattaacatgtaaactctgttgacaatatgtttccatagtttattaagcatgtatctcaaggaaaaaggtctttcatgagaagctgaaccagaggcaaaaaaaaaaaaaaaagtctcaaggctagagatcttcctttcttccttcttgttcctttataccttcttgaacagaacctttgtttctgaacagccaacagccaattcctttgactgctggacaactcttgaatagattgatctcaaattgatcactgcttcttctgaaggtaacacatttgttccgttgtttctgctgacagcacatggtgggctctgtagtggatctgggggtgctgatgttttctccttccatatgtcattgggtatttgagtcggggtaggaagccatggcaaacccattgcttctgttcatccacctatgtttccttattgatttgaatttatcccaaataaatttggatatttaaggcagggtgtgcacctttaattgttcagaccctagccaatggcctagaccttatctcactggactaatacacaagctaacactaggagttatatctaggcagggtaagcccccaactcgaatcttgacagccctgaaccccaccagattccccttcaccctttgcatctgtccagaattgctcctggaaaccctgtctctccagagtgagtggtagccagctgagatgggagatgggatgcccatggcctatgcctgagaccctcctagtcaagctccctgtctggataactggagacacttcgttctcaaagcaagcattgtgacatttggttctcttcacacatgtgccttacccagcttagacagatggaagaattgaatgtaaagagattctacagaatgtattggaaataacaaaattgtgtatgtgtgtttttaaaggatacccttttggttgccgcatgagttattttgttgttgttgttgttgttagagattaaatctcaataactttttggaattagaatgggcttcccatcagctgaatgggctacacactcgcctccttttcatagcaatccaagaactccactgccttcctcacatcccctgctatgttatcagcatggtagttttgcttgagatcaaatcagggcaacataggaactgtcatttttcatttaccggggccctttgatcccatttgaggtttatttgtttcaagtgagaaacacaatccctattgcatacatctattctttagagtacttttttattttatttttttatgttagagatcaaatcagagttgtaagtagtatggtcattagttatcaccactagatttcacaggctacactttatttctgttcttacaaaatcaccaaccttctctgttgcataatgatcacttccagtgaagccacaatgtgcctttcttgggtacttgggtgttaatttatttcacagtttcctttgcagatgcaatcagagtcacctatcacattcctgtttctgctttttattgtgttcctttgctatcgcgtttgtgtgatcttttcctgaaaaatgacaggtagtgtttctctgctcactgtatcagtgacatattttccacaacttctctattgctattttaaaaatataacattttatagatgtaatcttagttgtttgtaactaggttttgttataggagcaaatttcctaaatggcatgttggtttaggtacattttttaaagaaagggaaaaatattttctgcaaaatagtttcctctaaattgtaagtgaaggaaaagctctgttagtaagattataatgcattttcctgatttcttagtacatcgaaattcatgaacattatttttatgtaagtgattaagttgtggcttttaataacacgttgttagagcaaaaagagctatcccttttgatttacttgtgtatttactgggtgacttacagtgctttacatattagaattggtttgtcaacaattaacattctaggtttttatataacccatacttcaggtaatataggattattaaactacaaccagtgtgttagaaatctgcctactggtaatacaattcttacgtataacagcagctgagaaatactgctgtgtatttatgcatagattgcaagacagatggcctgcaagccgcagaagggcctgacatgcaggtccaccagcaggtggcgctgcttttctagaaataaaccctctacctggattctaggtactctcctcctcctcactttctgccttttctcttgcagattgtctcctttatttctctaaaataaatatctaaaactgttgttgctgttgtttgaagagatatacttccagtacgacaatgcccctcaattgctaaggtttatttgaaatccaacttgcctgatgcagtgcttacttgaagcaagtccaagttaaatacatgttactgtttttaaaaggtaactacacacacaatactggattcagcactgagattggattgcctatgctatctgattattgttatgtggcaagttcccattttaatctaatatctatttacacaaattaatcccataggcttctattcacctcaggataatgaggggcatttttattaaagtgactgattgatatactgaattaatgttttatataaaaatcaccttagtatgatgttctttcatcaagagttactctagaatccaggctgggtgcagtggctcacgtctgtaaccccagaactttgggaggctgaggcgggcagatcacttgaggttaggagtttgagaccagcctggccaacacggtgaaaccccgtctctactaaaaatacaaacattagtcaggtgcctataatctcagctactttggaggctgagacactagagttgcttgaactgggaggtagaggttgcagtgagccaagattgcaccactgcattccagcctgggagcctgggtgacagagcgagactccgtctcaaaaaaaaaaagtaaataataatactaataaaagagttgctttagaatccaagtcatccaaagaatattgcctttctctcggggccagaactacattttgacaaacaggatcagagtttctgttaagttttgttctgttttttaggaagacttttcacagaaaagttgatcagctcatcaactagggcatcataaatgaagagagaaatcaaatgtgcaagcaaaactatttttaaaaattattttgtccacacatacccaatttttcaaccgttttttaaaaaagacacagctatatctttttactgttttttttatggtctgcggtattcctttgtacagaatatttagtgcaaacattagcttatgtgggagaaaatgaatttattgaggttacagaaggggagaattgaaatatgtctcaggatgactcacttatttgtttatgtttttcattattaaattttcttcctttttttttttttttaaacagtgtctcactgtgtcatccaggctggagtgcagttgtgcgatcttagctcactgcaacctctgcctcccaggttcaagtgattctcctgcctcagcctaccaagtagctgggactacaggcatatgccaccatgcccagctaatttttgtatttttagagacggggttttgccatattggccaggctgatcttgaactgacctcaagatatccacctgcctcagcctcccaaagtgctgggattacaaatgtgagccaccattcccagcccttcattattaaatttctacctatcaggccgtaaagaactttggaagcataggcagtattttactctttgaataggatttctctcttttgagtttttaaacttttctcaggcatactgcgctaagggctgcaagttgaggatctagataatgtaatgtatgttcttatttaactcacccatgtgattttcacagagaacatcttgaaatgttattgattcaacaaaatcaaggaggagaggattggggaaacattttcttctcagtgaatctattttaaagcactggttttgttgaaaatgattttttgaaaatatggattgcagtcagttttcatgtaaaagtcaaaccctgacgggtttccttccagttctctgtagaggggatgggatcagctggagtagttgaagacaagaaatagccatcctgaaatcagggtaaatttacctggctgggctgtgaggaataggccttgtgagtttcacgggacccctttctgaggcattagataactttattttcctgttgaataagctctccagaaaaaaaagaaaaatgagaacttcaatggaactggacagttgccaagggcctccctgctttatttccatgcatgaatgtgtgtttcttaccttggaaaggaaagtgggctgagcgagctaggcagtttctgatagacttttgcaagatgcaaagcccacccactatcctctttgaacttcagtatttaaatcagaagaaaaatagctttcccagaggcttcagattattactaaatattgtgcaaattctatcatttggaatgtaaacgcttacactctctgccctttatacctccaactgtgccctcaaacacattttcctgctctagccaaattgactttcttacagtttatacagtttagtattttccaaccaccttgccttggttcaaactgtgtcctccacctggcatgcccttcccaccctctactgccactccttagtctgttcagcatcatgggtcaagtgccccctgagtgccaggccctgtgctccatctggggatatacgggacctctctattcatcctattcttgtttcaagtcgtcttctttttcttcctttctttttttttttttttcctgaacaattctctctctaggacttaacttattgtctaagacatttcatgtagccctcccttgacattctcatgcaacatcttttgtactgttgcatttatgtaacttatgagttcgtatattcgtatttaatgcaattatctaatttctctggctaggcttgtggttctctcttattgtgcatctttaaaaagattttaaagaaaagaacaagaaaaaggtatgcccgacattaaactcagagtcattacaaatcagagccagaagggtctcatacttaactaatgctcatccccccaggaaagggaagtgtcttgccaaggccacacagttgatccaaggcaggcctagaaccccggggctcctgatcactaagctgtgcttctcccctttgcaacatcgcctctgtagctgctcggagctatttattgggaacttttcagggcccagcattgtgagagactcagtgatatgtgaactccaacagaggagcttataagcctagctgggggagtagaacacattagaattgaacacaaattataataatgcaaggcatgagatcagaagtgccaggggattttttaaagaaaggagagaattgatcttgtcataatcatctgggaaggccccctggaggaggcagcctaggctgtcccttcaagggtggtcaagtagtcaggtgaaaggaagacatggtgggagagcctggtgaaggagtcactgcctctctaccccgccatgcctctgccccttcttctgtctcccatgtgtctgcacacgccgatcaatcccatgacctcccagcagaaattcaagggaaagaaaagaggccctcacaatcagacggcgtgaatttcctgtaatttagaggaaacagtggggttcctctgtccccatctgtctttcatttgttcttgccctgaatggttccagccttctccaattgaggtccgtttaaacgttttctggcttttcttgtttttatgacatttggcaaaacctaattatttgacttgagcacttcattggggccatatgaaacaagggacaaaggtgacagttgaatgagatgcaaggctaggggtcaggtgggggtgggaatgctcaccccattctaagtgttggttagcggctcaattgcttggggaaggagagagagtatggacccatgtgaattacaccatgtccaaatgtggcagactggtgtggagaaggacccagcagcagagaactctcattgctctgactcttcaaagccaaggcaataatcatgggtagcatttagaaagagctcaccaggaattcttttaagtgcttttcacattttcagtcaattctcacaacaacctattagataggtactctaattctcattttattggtgagaaaactgaagttagataatttgccaaatacctaggttcagacccaacaatgtggctttaagacctgtgtggttaactcttaacctctctacccactcaatgtgagtaggcatttgtggagggatatcccatgccttaaaatctttatttcggggatggtacacttgagtgtcactggttccagggccagaaatgcaaacatggggtgtctgccctatatatgggggtacagtaggcagcagtggggcatttgagcagctgataagctcctgccccaggagaatggcacccttttggaatgaagactcagtcctctacaagatttttaattagaagttagaaatccatatttgtatggacaatcttcagacttaaagattgtcccacatgtgaaatcctgtgtatcagcagggtggtgccaagctcagcacactggggacagtagttggtcctcaggctgtcagcctgcagccccctggttatgtcacataatcccaaagcatctccgaaatttggtgtccttggtccagtagggatcacagtagatcgtaggacattgaggtatggagtaactggtctgagatcagagctctaaagagggtcagagctgggacttgggcaggtggactgactcaagaagctcatatcctcatgctgttctcactcacaggcagaattctggcagcaaatgatctgaattagaagtcagccgacctgggtcctgggtcagggtctgcgtatgagtgcagctatgacgcaaaagagggtgaggccagagcatccccaagccgcttccagcccttctgttgcactccacaccttgttctccaatgcattgaccagaaaggcccaccatacactagcattataaaatattgcacaggatgtgtccgaggataaattatgatagcatacagataaagattttatagttcaagaacatctatagaaggtgattatgcccttaagaaatatactaaatgctgtgtttagtgtaaagtcataatccacactggtccttacctcccaaggttaaaagcatactgtatttctaaagtgttctggcagaatattcttcgtcgggcacctggcttgcactaaaaacccatgcattttacctttatctgagtttgaaagaaattatcagtgcacccatctggaatatatattagaattctagggggctcttgacaccattggctcaatggaagatatggtatttccggatgagccaatagtaataatgttaataataatagtggtttgtatttatataacatcttatggtttagaaaacagtttcacatatacacaattagattctaggctggtctttaaatatcacaatcattggggcaagcattaatttaaagaatgtaaacagcaaagtgaaaatggaaatgaaatgtgattgacatcttctgccagtcatggctatttgaacctgtttgggggtggggggaaagaaaaagaaagtaacattggtgtcaaaatatgtaagcaaataaaaactttcaccccaaagtggaaatgtaaatcaacattgtgttaaccaggaggatttgatgtgggatgtgaaataaagtccacgagagacctgaccccagctctcttttctgtttctcactctgggcaggtggcaaatctcagattcctgaggcagcatgatcttttctccactccttgggatgcctgacaatttgtaaatccacgaggaagtgtttgttgcaagggccttccttaacaatctcatgcaaacagcatgaagtgatcaaaagaaataagtcttgtgttagatttgccttgtccagttctgtggggtggcagaaccagtacctcaaacacctttgagaaatggtgttcagggctggaaattgggcgaggtgagagaagcttttgccctgggcaccaaatttaagaggagacccaaaacctcaggaatcaagataaatgatagtttcatgcaatattttcaaactatcaaaataaaatattttcaaaataatcaaaatttaaaaaatccaggatgaacagaatgtcataattttaagtgaagacagtataaatattgatttcaaagctgacatttaagtactgaattcactaggggtggaaacaatgaggacaccaggaaactagcagctgtagccatgggtgtgagcccttccagggtgccaggagcagtgtttggtatcttacaggcatttttttcttgatacacatcgggggacctgatttgacctacagtaaatccaaatctatttgattataaaccgtcttagaaaaagagttcctttacaggctccataaattccattacagtccactttgtctttgttaaatgtatgggttggaaattacaattcttttattcacaatgatgattttagacacacagctcagaaagatcagcattcacttaaaaaatatattagcatgcttgtatctattaagcactattgctttgtaagctccagctgatgattttattaagtagactgcaaaaggggaagaaaaatcaaggataattataaattcataaatacataattcattggcataaaatgatttaatggaatggatgtggaattatctatttcctcaagaaaataacagagatattctgattaagcctataatcttgtgtatgtgaaattctagccaaactgatggggcacattttcttttctgaaactacctttgataagaaatgcattacaaactcatcagtttggcttcctgttaacaaagagacagcagccgtctggatcattctggattcacagtgaaactgccacaccatgtatcctccaactaaagctgtgcaagtttgacaaggggcagatgaatccaggagttattgtgcagaggtttaaatctatgcggcagctgacggttgaaataatcatctatatatcgctctgagctagctggggaaaggttgaagctgtatattttcaacatatctagtctaatggttaatctgttgtcttgtacggggctctcgcagggtggactggcagcacacgctgacagcttcgaggaattgctcacggtagatgtggttcgccttgctttccaaagtactgggtggatgaatctaacttagcttgagttggaaaatgtgaaactcacctgactcatgacctcaaacacgagcggaccagcagggctaatagcaggttgggtggtagggacagtagagtcactaagctacctctgttcctcccaatgtccccagatctgtgcacttcaggtgggctccacgggtatttcttttgttatttggctgtcttggcaggttgggaagaacattgttctttgtggagactggaaagcaagggaaatgtgagaagattaaactactgcaggggtcagcaaactttctctgtcaaaggtcagcgagttaatatcttagtctttgcaacccatatggtctctatggcaagtcctcaactttgtcgttagagatggaagcagccagggatggctggtaaaccaacaactgtggctatggtctgataaaattttatttatagccaccaaatttcatatctttttagtgggttaccaaatattattattcttagattttgtttccccaatgacttaaaaatgtaaacacactcttagctcatgtgatgtacaaaaacaggtggcaggctacagtttgctgacccctgaacttgagaaagatgagaaagaagcagctgttggtgcccaggatgtggcaggtttcatccctactctaaaagttgtccctcacaaacgcggactgcaagtgctagggcaacctaaaggagtcaggtttaacttttgccacaaagccgaaagttggcttttggtgtcaggagtagggagtagggagagaaggaaaggaaagttgggaggggctgtttgtattggacttctatacattccccagccctcccagttggatgtaaagtaaaaattatctcccatctcctagtaccttcccattctccaaaccccatagcaaaaattcagggaagttctcgaatttttcttttcaattgtgcatttcctcttagaattccatcgttcatctctgtgtctcatctctaagaaactaatacctagtgatctttgcttgagacttttctttgcccttgaggtaatagagagtctattccagggaaaaagaaaagggctaaaggcaaccagaaaattccaaaaggattttctactgaatactgaacagggcggagtgttgggcaatgattctaacaggtcaagtctacagcgaagatatatgagctgcgattctagatatggggggctttggtacatgctgagttcctctcaggatgcatacagaacatagtttgagattggggttgagggcctatggcatgggtagcatgggcacatctaatttacccaattggattctagaggatccattaggcccgcagtattttgtagagaacactgcattccatgtcatgtggattctgttcatatatttatatagtattttttttctctctcctatggaggagctgaattctttcattactctgtgttgatggactcaaacttacacaattcaggtttcctaggcagtgaatagagccagaaatacaccctgtgattaacttctacataacctattgttccttaaagtctccctccccattttcctattagctccacaaaagccagaaatgcaaaagctccaacaagcctcccttccctgccctggcagcctaccatggggtgggcactccctatgcctgtcctagggcagtacaggtcacttagacattttttgaaattcttattctgcataacgatagattttttaaaaactgatacccattaggttttccaagtaaatgtgtttcctatttcctagctagaagttgtgaaattatcctgccagaataatgtatatgataatgtggttgtttgattttagagaggtgtatatgtttgagatattatgatcgttggggttgcttttaaggggcagcatctttcttcttttcctaatctgtggattaatgttagccgtgatgtcagaggttgcagtgaactaagataacaccactgcacaccagcctgggcaacaaagaccccttgtctcagaaaaagaaaatattagccacgatctttcaaaaaatagatttatagttgatttttatgaagaatactgcagtgcttatcaaacttcttagtgatatgtgctattcaaggttgtcaggcaagaaactctcattccaaggacatcacccactttaactcccctgcaccctgatactgcccactactctctgggcgtagaacttggctccattgcctggcttgcctgatcctagctgtgcttaatagctcagcctcgtcgatggacacatggcattccccaccacgggatccatcccgaaacagcagtcaagtgctcctttacaggaatcatactaccaaattcacagtatgggttgttcagctggcatgtattattatttttgtggttgttttcccatcatcgcttaaggaaacaaccacaccctcttacccgtctggttcgtgtgagaaacagccaggcaccattccatcctccaatccagagactgcgctcttgtggccatgccgtaagactttgagagttaacttgcacaaactttctggtgaaagtcttaaacagtcatatcagagagagcttaggtcagcttgggagttttgttcatggtgaattacattttgcaacacgactgttgtaaaattccaggaattttaccatcactccatacccttcattttagtaaaacaacatttgaaacacccacttttcactggtgtcgctgacggccgaaggaaatgccgtggatctgtctttctgaggagtggcaaactcacggcatttaatgttaggcactgataccacaactaagggggctgaccaagccggcagttcgagacagacagcaaaagtttatcaccaaggattgatgactcggaatataatgattattcagtagaatttgttttagcagacttcaggaaagaatgggtctgatcctgctgctaaactgagttttcggtgtctgtacatgttgtggggtgacggggaactcagtatatttttggaaattataccaagaagattgtcttctgaatttccagaagtattatccctactgatacagatgacaataagacggcaaaaagaattgcaggaagtcatcagggtaaaagaaagggaaaaaaatggcaattcagctgtgagggagaaacttccagtttgattcaaagctattcaatgttaaaattgtttggaacttttctaaaagaaatttcactatggattaatttccattttcttttctccttattgtttggcagtcaaggttgcagctagatcacgctattccaaagatccatttgagttcaagaaggagactcccaattctcggcttgtgaccgagccaggtgaaggaagactgggacccattcccatttttaataactaccctgcagccctcaacattctactttaccatgctgagctcagttgaagaagagcgatgcactactgtggatttcagcttgcacttagcttgttgggcagcaaaataccaaaagggaaaaccgtaaaaaacgattaataataattaaaacgacctcacccccaaactggcagcttgtgcaagacttcagtcggaagccctgttagctagatgcctttgtgttcaaaccactttgcatgactcttattctgagtgactccagtgtgaatatgacattactaatgacctgctaagtgtgtacagatgtgggtttctccagatgtggtgattaataacataatggagatagcggttgactcatgtttatgagttgtttgccttttattacgtttctgagtttatttgctttgaactgttttttaactccagccaataaactcacctttaaatcttaaagggcatcatccccttaaatctcactggggaaacagggcagagggaatgtgccccaggctagagctgagcatcaggtccatctaatgcaggcattagactgaattagggaaggctgggagttgcaatcattgccccatttcactccaaggaccataaagaggcttggtaaaccctgacacagtgtttgcagtctggcgcggctgataaaggaagatatttctttttttaaaaatctagtgaaatatgtaatcattttgaagtaagcccagagttctggccagtgtttctggaagacgttgcttttgcttgaaaacagaatgctgatgaaaagtcgagtaaaatgttgttacagatgttcaactctgcattaaggctgttggaattaccaccacatcttaaatcaattctcagaacattgtctggaggttatgtcattgaaataacgaatcctctttagtcaagtataagcaaacatgttaaaacatcattgtaactttaaattaaactctagcgcaaaccaggggatctgaagcctcattagacttgcctgacatttttctagcactgagtcttcccaaactgtaaaactgttagattcagtgcctattagacaagggagcgctgggaagttacaacagcacattaagtgttatacttagggatgtgcaaaaacaagcccttgaattttatgagtacttggagactggatggagttcagctcctataaaattccacgttagattcctgaacttgtttgtgttctaaagaagtcaggtttctttaaaggatcatatcttcatgtggcttccgcagcatgaaggcaagtgaaaatgccatagatggaggtgtattgtaattagccaaaatgtaggttaaataagagcttgtaaatttgcatcgtcatgaggtagtggcccactacttcaacacgtttgtctttcatgaaagtgagtaaatttaagtctcccttttaattccatttttattcctctcatgtagtcacagaagccatgaaatgaaaattatattttatagcttaactaaaagttttcctagatctgctttctttatgcagaaattgataggatccatataaaggctgataattaaatatggtttatatcctacttatgagaaagaagttatcactgcttctcttgagggacctaagccatatgtaatggtctccattacacagcgttcatatatttaagctggagacattttcccccatctcttcagggaacagatctgcatttttaggctgtgagtgcaggaggaaacctttaaacacaagtttcattttggagaacaaatcccactttaaatgcagtatgattacgatggatgatctttctgagttgcaatgaaaataaatagtttctttgcatagaagaggcataactttactaccagaatgaggtgtctcccttgagctggctaacaggtattaacttgcaactctcccatctgaagatcagtgtagcaacaaggtgtaaagataatggccacttaaccaaagaggattatttgttataggcccaatgcaaaaagggaagccaatgctcagcaaaataatcccacaggcatgctagggaggatgacttctgttcaggtcttaactcatctagattcattgtgtaactggacacaaccatggtagcatctggtgaccttgaaaaatgctagccgtggtagactaggttagataaaaacctttggatgtgggattataaccttaagaagtctaactgaattataaccttaagatgagaaaaacagaacttgcaccccgactagagtgactcacatgcactcacacaaacacacacgtgttatttgctccagcatgctacacaaccagtctaggtcaccctgaacacaatacaccaattgcaagtggcccatattaaaagatgaccttgtcttatacgtctagttagtgcaagactttctacttcattctaagatggggaaagtgcgaaagcatacctacacacacacacacacacacacacccacacaccctcgctgcctttctaccccattattgcctcagatgcctggtcccctatcctgtgaaaggaagatgaattcaggtcaagctcagagtgcctgtttgcttgccgagagatgcatatcaactctaagtgattttttcaataccatttatgtggcttgtatttatttcctttaatcttttaagtgctgtttagtctctgtgtgatttgctttggatactcatttctgataagatgcgatatcatcccagccacatagtctctgcctggagctctaaatgactgatacagtctcggcctgagcttgggccctggtgggtgtcagaggaagcaggtggtacagggggtcggctgtgggtgtttgcaggtgctttcttgccttcatctcttctggtctcactctcaccttacaccacagtcattcccttttcctgcatcagccagggtttagacaagcccaaactgacagcagaataggagagtgtaaaatgtgtaatactttgaagcaggtttggagggtagttggattattaaaatagctttggaagcatgtatcataacctactaaatttatttagcgttttcagggaagtaccatataatgcatgctctaatatgggtcttcctggataataccaagtagctgacatggcactttctcccccatctaagactcctacaccattaacatatatcaagtctcttttgatgtcatcactgctaatatttctcttcttagctttaaggtaactgctgtgcattctgagtttcagggtgctttcctcctagtctgtgttgcagtcaactataagaatccaaagatcttatttttccttcttgatattacagctttagcctgaattgtgggggtggggagaggaggactagaattttgccgctgatgcccctgggtgacaggctgggtttgcatctgctaattatcaagcagttctcttaaaaagaagcatgatgcaggctaatacatctgcaaagcttattagtgggtgtctttgggcaagagcagtagagtgtgctgtggtgtttctaagtgaagcttcacattgcttagcaatctgtgtggtttagacatttggaaaacagcttttggtttccaatcccctgtgctgccctccatccctgccccgctgctgcatcatcagagatttcattcaatggcaacctcctccttcattccggggctctcctccaacctcaccagccccggtgctcctgtcttcatgggttgaaaaaggaccccgttggcacagccccacaagccctccctcctggcagttggagggataagagctgagttgggctggggattattgagccagcatgcaccaatgtgccccgatctgattgaaacattggctgtcaaggccttgaatccttgcctcttttcaacgctctttctctggtatgcaggggttaggaaccagctaagttggttcatctggagaagcagcaggctggcagttatgctgacatttcaaatacaactttatttctgattttggttacaacaaaacgcagtctattactgggcaaagcaaagtaaccaaaattaactctaagaataatgataagtattttttttggtatacagataaatcatgatttcttttttttttttttttttcttatggcagggtgtttacaaactgttttagtctgtttaaagtgtatgttcaaaggctggagtgtaaagaggtgttgccttcaccttctctaagccggcctctttgactaacacatttggtctttgtcattgggtcctaaaagacagccatgaattcctagtgagtgactgagccttgagtgtgtgtcctttgatattttgcctgtattgcacagtctgccctcaaactgttcataatctcatgagctgcctgtatttccagttgaagatgagcagccgtcaacactatcaccaaaaaaaaagcaacggaatggaggcatgcggaactcacccaacacctcgcctaagctgatgaggtaaggagaggggctggttgcccacggtttccctcttagcccttctcttcctcccctcgccctctcctcaccctgccaggcccagagtctcccctccccagcaagcccggggtgggggaggggagcgagatcgttagatggcttcttaaaggctggagtatttattctgtcagcttgtcagcagttaatgatagagctgaaaaaattctgtcatgaaaaacagtttgaaaagctgtttgaaaaatacataggctttaaagtcttagctgtcaccatgtcctgtctgtgtgtagttcctaaacagcagtggcactaatgatggcggtaaccaatcagagaaactcgtgtggttagtttgcctgcggcagtctctttctgctggagtccctccgaggactgttttctgtacttaaggccatatgtgagatgtatcatcacaatcaaaaatgaacctgaagattaccttccttttatcctgtcgattgaaatcaaatttctgttaattgattttgactgataagaaaaagtctaataatctgtggacttgccaaagcaaagttcaaaagtaatccagttctgctcaggctaaaagcaatattaattatgaaatacagcatgcatgtacatgttccctcctttcctcccttccttccttccttccttccttccttccctccttccttccttcccttcttccccctccctccctcccttcctccttctctctctttctccctcacttctttcttgactatggcttcctctggtaaatagcaagtgaagtcaaatttcaacagcgttctgcagtttcttcttcttggcctatctgtcttttatctcccctttttgtcttcaattcatctgccaatcccagcatttttttcctccgacatcctgactctctaccacccaaatgaaacaggagtgatttcagatttgcactgctcaccctatgtggtttctgctctggaaatgcctgccatcttgacattagttttgtcttttcatggccaccggctttgatttttgaaatagaatagtggtgatttccactccccatattcaataacatttgcatgttcctggccctccacatccacctttctggaaaataggcaagggcagtctttcttcatgtggttgaggacacaggttttccgtggaagactcaccctgcccaactccttttccatatcaccatctattcctgttaaatgtttccttaaaagttctctgccttccacttcacccagccttccttgggtttggctgatttgcatgcttgtttacagtttatgaggaggaataaaatgtgccaactgccaagcttttcgtttttatgatgccagtgtcatgctagcattcatttcctatttactcacctttaggtaatcaccttatctaattctaatagttattcccatttaaagtagagaaaagcccagccactttccttcacctaaatttagagaagcaaataaataaataaagagaagtctgaaaaatctgaaacctttggagccaaattccctgtccctgtttgctatgtaaagtatggctcatttctttgatcttgagtaataataattctgaggagttatactgttttcatatgcttcaaagctgtgtcaaagttttgctgcttaagggtacttctttattctgttggctcttgggtaccaagatgacaggtcttctgtatgaggtggaggcttttttaagtcgtagccttcagcaaaacatcaaattaccaaatccagggtaacatacttctacacaaatgcctttcctgtagatatattataccatatatattaaatactttagtgttacacgctacattttatgtgcaatagaaagtgatggtttgaggtagccttggggggactttttttccacaagcagaaaaagctagtgtatatcgtatcaagtatggtttttacaggactttctgcccgaaggcctttgtaaataagtaatgatcaacagattggctgtgggtttttgaaaagcatgcctgtgtcagtttgcatgatgggggagaattttcaaagtggatcttgctttcattcgttgctggagaggggctgagggaggcagtcatcctgggctggagctgtctgtttcatggtacatcaaaattgctaaacgtgggtcaggtggtgagtggaaacttgccaagctacagaactcgggcttctcatgttggttgcctttgggctgctgctaaggcctcagttcctgtcgctgggatgtcttatcccaccagcccaccatggtctcccttcgcagcccagctggaatgggccatcccatgacaagtgagaaagtcttagacactcctcccttaccacgtctttctatgtcccaggtgctccacattctccatctgacctgggagcaaagatggacccctcctgagccctctctccatatcccttgacttccagtttacagaaagacctcagggccctttgttttacatttgaatatctggcactggcaatgaagtcatgggtccatttttgctaaaccccctttgttgattggcagaaaacaagggctctcccagctccctgtggcttttccagttgcccccgcctcttccgacacctgctttctactctccagtaaatgggactttcaggtcctattcctcatgacctgaaaaatccataaaggaagctaatgacttatttgaagtggatttttcgacatgagtttgtgacttgcagtttgagcagaatcaatcattctgaatgcgggcaggttttagtggcctatgggcagtgacaggaatagctccaagaggaactggagaacccagaatgggctaggatgggctgtaatttaccactgtggcttctgcaaataaaacagactcctgcgtgaaggctccttccaaatcatctgccagcaggagatgcaacggggactctgcactaatggtcttttccttccctttgttcttgtatcaggcttaccctagtgtttaagtgtcacttaactctgcacgatcattaggtgaacagccttgttttgtatatctggatcctgaggtagtatgtttttgagtcacctcaacagaaaacaaccctcatgtccagatagagctgaatggcgagtgtctgggccccaggctgaggacacacgtgtaatgatggataaatttggctccacacccgcagaggaggtgtgagccatggaggcttccaagtccccggctctctctgcctgttatttcccttccttcccggtctcttactgtggaattattgaaggagcctcccgtagttttcctctaaaattaccaagcacccgttgcccaattctccctacttagtggggtggtgccttgtaaggatagccacgtctttcctcatttgtaaagtcctaggggggcacaaagtttgtctctaaatagctaagtcaagagttcttaatttgggggccttaccaaccctatgaaccttcaatgaaaactctctaggaagtctttctaggaaaaaataaaaagtacacttgatccccttttaccacagttgaagcaggttaatggattcctgaaatctccattcaggatccctggttacaatcacattcagtttattccagagccacctccacatagttgcacgtacaaatgctttttggttgatgagatttctccaatgggtaggtggtatggagtaaacacctgggttctcacactgaatcctcacatggaatccaaaaagtctgtgcacttcggctgcctgcttttaatctttttctcagattagctcccatccagcaaatatttagcgagagcctactgtgtgcaagttgtcatggaagttctttaaggaatctaaagtctagcacccaaatgactttagatcccttaaagaacttccacacagtctaatagattagattagatccctgccttcaaaatgcttatagtttagcagaggagaagacaagcacataaaaacacagaattgggtaagaacaagctgggggttccactagcatgggctgtgagaatagaaagagctgtcattacctctggtttgggaggctgagcctggtttaggaggaggtcttattgaacctagttccataccatgaggagaatgctcaactaataatattacttgtctaggtttaccgagactggatgcctgtaactcactgagtcctaactacaactctataagtagttattactcttgcccccattttacaggtgagtatgttgaggtacagaaatgtaaagtctggtaaatctaggtaagttttccctaattaggatgatggaagacatagggacagtgctcagaccacagtaaatgcctgggtgtggctatagccaggggtctttggagtggcctagatggagtggagaatgtaagagtattctggcacccagtcatgaaggttttgcttgtcataggcattagggaacccctgaaggttttcgaggaggcggtaacctaacttgtgttttgggggaatcactggtggcagcagagagaagggttgggagtcctccatcaggagatttctgagacacacactacataagcacagaggtgtgaaatagaaggcccactcaaccccagcctctgccaaggccgtttgtgtgctaagccattcagggtctgctgtagaatagtagaccaggactgggatacatagttttcccaaggacacacgtaattcctgacatcagtcctgagacctagagttttcctctaaaatcatcctagttttcctctaaaatcatcaagcacccgtggcccaattctccctacttagtggggtggtgccttgtaaggatagctacatctttcctcatttgtaaagtcctggggagcacagactttgtctctaaatagctaggtcaagagttcttaatttgggggccttaccaaccctataaactttcaatgaaaacttcagtgaaagttaggatttacataggatgtatcaggtggacagtttacacagatagcacccagctgggctggcaaggataattgacaacacccagaaaaaagaaattgaacattttgaggagagtttcatgtcaggagacccagaaaatattagacattagtttcctgaatgggaggcaaaatatgatttgaggaaaacagattatcctcttgggcatctcctggtcattaagtgaaataaactcatctacttgttaagtctcatcacctctcttttgactcaaacctttcgtggggtcattttgttaggacttctcacatcagagcctgctagcatgaaagattttagtaatagaaaatggcaaaatggactgagccaagtcaccctcacaattccttccactgggcaaaagaaagaaggaaggcagggacagcttagctaagtaaattcatctcttaatgcacaaactgatagcatatgacaggcctcccccaggactggagaagaaaaaagtagttggtgtcatggtactgaggcttgggtggaccacacaggtccctggacaagttcatgctcagcagatggtcatgaccttgccctcttgtgtcaagagcatcttgtacaacctcctgtaggactgatgaacgtgttggttctcccaggctgtctcccaaacataaaggcaaccatttccttcttctgagaatgctggctgcctaacactagataacatcttaggtggcagcagggaaaataatgcaagtagatagatgcagagaaattgaaaaggaccctagttctgccagggtggctacagcctggcctgagagttttgtcagtgtggctccagggatggccgtcaagtgggagatggggagagggtggtgggcagtggtgtctcgggggtgatgatcattatcagaagagtggaagccctgttgaaggatgtgttaaggcaggagccaggatttgctctgcaaagcctcaggaagtatcaggaaatagtaatcacccaggagccaaggcacccaagaatgaggcagatccagttggaaccatttatggtgctgaacacccaactatgattccttttgaggagaccacctaaggcctaatccagccttctgtgtctgatacaggctcagacagacccgtgtggcctgatattcttgaacattgtgctcaaggtcttagtgactagataccatgttgttaaagaagggtagaacactgaattgtaagtattgcactttgcgaggactagtatttaatttgcttgtttaaatttatttgctgattagctcatgggaagagaagtcagcaagagagagtcattagtgcagcatctagtcagtaaatccccatcaagaatcaagtgttgacacaatgcctcgagttccacagagtcacagagaatcagagtaggcacccagaatgtgaggcgcctccttcaattttgcaccctaggcaccctcttgtctagctgtagtcctggctttgctgaatagaactacagccttataatctgtgtgttgttgacaattgctaacttgggtaggatttactgaagccatatagattctccatctgggcaaaactttatagtggtggttcttatactttagcaggtgtcggaatcacctggagggctttgttaagatatagcttgctggtccacagccctacacagtctaattcagcagatctggcctggggattggaaatttgcatttctgttaaacttccaggtgatgctgatgcggctggtctgggccacagtttgagaaccactcttttgaagaatcagaacagtgagaggagcttgaagtgatgggggcccatctctaagaagtgttcagactttgcactggagaaccaaatagttgcttaattaagaacatctgtctgaccactgacatgagtcctccctgctgattagttacagcagctggctccaggcgaacttcaggcagccttgactggttagagacataatttagggttgtccttcacatcacaatgccctttttatagcaaatgctctgtgtcctaattcatacgcagtccctgtaaatgaaaaatgatgcaagaaccctgattgttcaaaaacaaattgttgcaagatatcagaggtaaatgggttctcactgcacacgttttggatctccacgaaaggtttgctgagtctctgttgactgcttgaagagtgtttggggactagagatgattcatcagttcctttagttagtttgattgcatcctctgctggattctggaaatacatggaagagcaaaatagatccctgcccctaaatagttcaccatctaatggataaaacagacatggaaattattattgccgaaggagcatctctagaagttcccaggaagggaaaataacttcagtctctctggctgttcaggatgatggctttatgaggaacacttgagccaaactgtgaagtctgagaaatgtcttgttagccccatcatggtgccttacataatagatgctcaataaagtcagtatttgcagctcggataaaaggtctgtggagggatgagaaattcacctccttttaatcaagcctctcatctcccagggagaccactgtaggatgcccttaatttggatgggatgctcataatgacagaaaaggccttatcgtgtgataagacatgaggtctcgaaaatcaagcagagaaaagaatgcaattttctagccattttgtaactttcctttttcataacatttttgtgtgtttggctggttttttgtactttcatgtaaatttctgaagtccagcgttgaacccagtgccaccgaaggaactgggatttgctgtctttgcctgtaagggaaattgtgcactttaaaatatgatatcagcttcctcacagcaggtttgctagaaaagggatttgtggttttgctttaggctgttgtcttcaaggcgagctttttctgttcctgttgtagcagggcatttagttcacttcctgagattaattgatgccaagtggcatttcttgctctgcgaatcctcaaaacaaagatcttttgcaggcacacctcagagatattgcaggctcagttccagaccaccacaacaaagtgaatatcgcaataaagcaagtaacacacattttttttctagtgcatataaaagttaggtttacactcttctgtagtctattaagtgtgtacataccttcattaaaataatttactcctaaaaatgctagtaatcatctgagtcatcagtgagttttaatcttctttctggtagagggtcttgcctcagtgttggtggctgctgtctgatcggggggtggtagctgaagattgtggtggctgcgacaatttcttaaaataagacaacaatgaagattgctgcatcgactgactcttcctttgacaaaagatttctctgtagcatgtgatgctgttggatagcattttacccagagtagaacttctttcaaaattggagtcaatcctttcatactctgctgctgcttcatcaactaagtttatgtactattctaaatcctttgttgtcatttcaacaatgctcacagaatcttcactaggagtagcttccatctcaagagaccactttctttgctaacccgtaagaagcaactcctcatatgttcaagtttgatcatgagtttgcagcaattcagtcacatgttcaggctccacttctaattctatttctcttactttttccaccacatctgctgttacttcctccactgaagtcttaaagccctcaaagtcatccatgagggttggaattcacttcttccaaactcctgttgatattttcacctcctcccatgaatcacgaatgttcttattagcatctagaatggcgattctttttcagaagtttttcaatttattttgcccagattcatcaaaggaatcactatggcagtgatagcttattaaatatatttcttaagtaataagtcttgaaagtcaaaattaccccttgatccatgggctacagaatggtagttgttctagcaggtatggaaacaacattcatcttatacatctccatcagagctcttgaataattgggtgcgttatcagtgagcagtaacatcttgaaagaaatctttttctctgagcagtaggtctcaacagcaggattaaaatattcagtagatcatgctgtaaacagatgtaaatgcctgacttcaaagcttcaaaggacaggctgattcttgttggaactaatgcagctggtgactttaagttgaagtcaaagctcatttaacattctgaaaatcccataggcattaagaattatgtgaaatctactctgcctgtgctctagcaatggaaaaataaaccttcaatttgtaaaaaaaaaaaaaaaaaaaaaaaaaaaacaaaaccataatatctgcaaagtgcaatacagcaaagttgaataacatgaggtatgcctatgttcttcttcttttttttttagacagggtctggccctgttgctgggctggagtgcagtagtgtgatctcggctcactggcagcctcaacctcctgggttcaagtaattctcgtgcctcagcctcctgagtacctgggactgcaggcgtgcaccatctgcctggctaatttttatattttttgtagagatggggttttaccatgttgcctaggccggtctcaaactcctgagctcaggtgatctgcccacctcagccctccaaaatgctgagattacaggcatgagccaccatacttggccatgcctgtgttccttattagactttaggcacactgaatttctagctgtggacactggagggtgagctgagatgcaagggttatggggtgaatttctgctaatcattcacataagtggtgcattttgtaaatgcctgcgatgctggtttccctttcttggctgcttagaacactgcaacttggggtgttttgatggagaatgaacaagatatggctgcctccttaaagtgggagggtatgaggtgggcaccctgcagcactggccttcagccaagtagacctttttgttaaggctttgcctctcctctcactggctgtgccacctgagcatgttacttatctattttgtttcccatgtatacacagagcccgataataacagaaattacctacaggtgttcttgtgagtagcaaatcataaaatgtaggtaaaagttttagtgcaccaacatttggaagtgttggactcatggcagctattcatcatagtaacaacaatggtaatagcactagtagcagcaatagtagtagtattaatagtagcagtagtagaaataatagcagtagctctatatctttattattgaactgctctccctttcctgcctcctttcaccataatcagagctagtaatacatgagtgggtcctaagcaaagtataaaggatgataaccataagactagttaacacttcttgaggacatgctctaggtcagatgctgtattcagggcatgaaatatctttactcatgtaatcctcaaatggaatccattgaataatgctaatgattaacattcccattttacagatgaagaaactaaggcaatgtacaacttagcaagtaataggtgagccaagccttgaagacagacattttggctctggagccagggcgcttaaccactatggtatactgtcactaaggaaataggtggtttcctgcccttagtggtatcaacccctgaacactccatttggagatggactctataagtcagactgctcaaattagctggctagtgttcaggcttcctctttgctttaagctgggctttcattggcattgatcctcaaatgcatgtctaagttaaagacggagagaagttaccactctggcagagcagatctaacatgcctgtatgttggtggtggggtagagaaggtggttggagaggggaaggatattggccgaaaacctttagaggagatactgggtattacatatatatgtctatgtattcctgaaataatggcgggatgcttttttcccccccttaaatggacaagaaaaacttaagattcaagaagggcagccgggggccttcagctaagggatatctgatatattgtgcctgtttttcttcaaggtgggctattgtgttaattttctaggaatgctgtaatcaagtatcacagacccagtgtcttaaacaacagagcttctcacagttctggtggctagaagtctgagatgaaagtctgggagggttggttcctcccaagggtactgagggaaggatctgtttcaggcctctcttcttggcttgcagatctctgtcttttccctctgtcttcacatgattttccctcctgtggaaaagttggcccaaatttcctcttcttgtaaggacaccagtcctattggatcagaactcaccccaatgacctaattttaacttaattacttctttaaagaccatatttcaaaatacagtcacattctgaggtaccggcggttaagacttcacataaaaatttgggggagaacacagttcagcccataaaaatgaaacagcagatatatctcacatcatagagtttctattaccctaaaatagggcatgtacattggctaagtcgcaagtgacaagtgagccttgaattaattatggtgccttttagggaaattgaaaattactttgtgagtggaagacttaggtaatgtcattatgatgtgaaagacaatatctaatcctggtccttgatttcaactaactggtctttgaggagttgtgggagaggctttggaagtgggtctctatcaccttgcaaactgaagatgttgggatcccttgttcagggagatttctcatgatcctcctttccatacaacaaacggcccaattcctctgggtctccctggatcacagcagtgttgattggtgtgctcaatggcaaatgcttggactttcttctagcaatagaagctttagaaactttgatttagtccctgtggacaactgactgtacactctccacctgttccagagatctctctgcagcacaggccagcctaaggcacttgaaattactacagcaacagccatagtaaagaaatttatactgtctggccagaaacagttacagactctattgttgctggaacgaattgtgttcccagcttactcccagactgtgaaatccagtgagtgtgtaacagtgctggcccttactggagccataaattaatccctctcccacgctgcttacctctcatcttcactctagcaacctttctttacctactcagggctctccagccttctgatatccaacaatggtccagtactttcaaaattcttctagctgtgtctttctccagtgacagcacagtgcttcaaaccttcaggatcttctaggctcgcccaacctttatatgcatatgctcactgtatcccttgctcttgtggaatggctcaatgatagaaaacccactgtcttgggcaacaactcatttcatttttgaattactttcaatttttataacaatcttcctgttttggaaccatgatttttgttctctcttaatctcatggatcattcttagtctgctgtcaatcagtcatactcaatcagtttaatccatcttcaacttgactgtcattgcacatctggagacagctggaaggcctggtctgagtcttctgtaccttaggttaggtggtatggtatggggcatcttcagccatggttttaggtgccattatttggcccttttcatttgggcctcaattctctgggtgggtcctactggctattagtggatcaacactgcaacatgctgagattcctcttcatttctcatggttcagatcaaatgctaatttttttttttttttttttttttttgagacagagtctcgctctgttgcccaggctggaatgtagtggcgtgatctcggctcactgcaagctccacctcctgggttcaccccattctcctgcctcagcctcccgagtagagtagctgggactacaggcacccaccaccatgcctggctaatttttttgtatttttaatagagatggggtttcaccgtgttagccaggatggacacgatctcctgacctcatgatccgcccaccttggcctcccaaagtgctgggattacaggcctgagccaccacgcccggcccaaatgctactttctttgcaaaaccttccttaatgctacccaaataccaggatatgaacagcttttttcttggtattcttgtatcaccttgtactttgctgtaacacttgccacaaggtactgtaactattgaactattggtgtatatatatttttttcctgctatcttgtggacctctctttgactagggactttatcttaatcattactgtagcctccattccatgctcagaataggggattcttattgattgctttactgattcaattggttgctttactgattcaataaaccaaagttagaattccaggtaccatgctggtcagagagggtaatgtctttgttccgggaggtttttgatgttcctcaggtcagtctcttgggggaaatcctggattgtttatatttaaatggtccaggccaggatgagagatgtgtggggagtagagtgtagtgtggcatacctctaagacttcctggatgcctctggatgttccattgcaaaccatggcttgagctccagtgtgaaattatgcctggtttctggaaaccactaccccagttaatgaagcttgacattagctgtcttttttctttttattgaagggcgatcgatcatcaggcttgcttatttgcttttctggatgaaagttgtaggccactgttaacaacgtctgactccttcccagaaagaatcaagtataccaaaccaaaatgtatctcctcttccccaaggcacacattttctaaaagtgttttttgtcagcttgctgtttcatttgcttgcttgctgatattatgggaacatagttctgagtatcttttaaatcctaaatgcactaggggcaggtctcaggtcatcctgaggtaatactttctctccaaccagtaaacagggcaagagaatttgaacctggctctatatcttcagggcaagtctgctaatatcctcttgcaactgaaatatgttcttcatgggctggaaagagttaattttgttcattttctcaaacctcttctccatgatggcttttgtctacctacctattccagataatattaatagatatctatgcaactgttaaagactcttcaaggacaaaaacatccctcaaaatgtgctctcaccctgatctgtaaatagttcttatcagcctttttatcttaacatctttgactaagttcagtatttggaagatggcctggtggtttacatacctcaagacctctcaacaatccagacactgagatgctactcggagtgggattgttcttcttttaagatcagatatgacagatattcctatagtagtctagcatgttcgttgaagataactttgcaagttggcttcacatagtatttgtcatttggtgtagtctaaaagcaaattctcaggcataaataaaggcagtgagaaagttttctcaccttatgtgggagtggggagcatattggagggtcgtggtagttattcaaaagcttaatcctaggtttttgggccatggaagagattgctgtcccactctgtactcttgacatataagtgggaagtatcggagacatttcagaaggacaaatagtaaaaagtaaataaaagtcagcctctgcagagcgagactctgtctaaaaaaaaaaaaaaagaaaaaagaaaaaagtcaccctctgatgttgaaatatagaatttcaaaaggtaaaatcactttacaatttatggaatgtgacccgatgtatattttctgtcttgtgttgacaatattactcagaaaagatagctccatttcaagagtggttaagtatagctgggacaatgtcctaattatatggccagttttgcaggaaggaacaatgacttcccaaacccgaggtgctgaatcactatcagagataaaagcatggacattgactatgattcaaggtgcaggagcttatttattgtgctataagcttgttagaactgcctgattccattgcagttcttaaggttgtcagtgaggctctgccaacccactagacgggaggcctttatggaagcatcttccttttccaccaatagacaaggcaatagagggcgaatgttgccctgagaatttgaaacaagtttattaagatgcatctgagcttgaggctctcatctaagatatgcagcagttgggaggtgaaggtggtggggagcatcattggatggttagtgcatatacagttgtcaaggcaaggagagagggtgttgtttagtattgaaatcatgtattccagatgtgggcatttggtagtcagtctgctctgaagtgacatgctgctgaatctttaaaggcttcagccagggagagcaaaatctgattgggcaaattgctaaaatatttaaagtgcagcctgttaaagcttttactgcgaagagcatcacgtcagaagttgtagtcagaaggagcgagtaattggctttccatcctcatgccagtcagtcagcatgaggctctattcctattccttcctcttcattgccgaggctcatagcaaccctttggtgtgtctgtctgtgtgtgtgtatgtgtgtgtgtgtgtgtgtgtgtgcacgctggggagatcgaatagctggtaaaatgagaggaagaggagtgaggtagccttaaaaagggaggctgaatccacaaaatgttaggaagaccatttaggaaaagaggagcgggggaaaggcagaaatgctccctgacaaaggtcacctgcacttccagaagtggggtggtggtttggggcagttgtctctcaaaggatggattctgtaagcagaagaatggccttcagtgacaaccacttcctctgcatctttcacatcctctgagatgtaattcagggggcactttccatttataatttatcacattttccacttaggttttcctgtccttttcttcccaggcatgaccccttgttaattcctggcaatgatcagattgacaacatggactccaatgtgaagaagtacgactctactgggatgtttcactggtgtgcacccaaggagatagagaaagtcatcctggtgagtgagggactgtgcatctgatgttgcccgcttctgccccaaaccacatttgctaggaatggggtttccctagttggacagtgggataatactgtccctggtcctaattatttttgatgagtgaaattctgagcatagattgaagcagctagacctctgatcagaacataagcaatattcagatttttcaatctctgaatatattggctcctcataagagtaggtgagcacttgctgtgggaaagccatggtgggaggtggtatgaacataattcctgtggccatggcgctggtgtcagagcctgcctgtaccaattattagctgcatggcttgggtaattcatttgactttttgcacttcggttttcttatctgtaaaaagatgagatgagaatgaccctaactcatagggctgtagtgaagattaaaatccaacagatgactcagtaaagttacctcttattcttactattattaaatgctgtgaggaaagctgaatgctgcctgtattgttattggtttatagcaatgttttgtattcttatagataatagccttgtgcatctgtgagctttcttagtgcatgttgtagacagggaaatgcatgatgatgcatgacataatgatgacaataatgaactacagtccccttggggaggctggggctcagagccctatttcgtggaaggcttgtgaacatcttcatagcagcagtgggctcacccagtctctcccaggaatgtcagcataggtaacaatccattctactctctgcccttgttctattaacagctttgggtcttaatgcctacactggctttcctacagtttattgtcttgctaatccatgagaaatggattaataatcaggaaagtcagatggaagggttctttctcccttgggcctctaatccccagattggtatgggtctgttcctttttgtcagccaggaaaatcctatcatttctgatgtcaggaccacccttcctaaacaaggactgttctgggtcctcggaatggctttgtatgctaacacactggactttcccctatgctttatctatgtgtatgtgtgttctcagcttaattataaatgagcattaacagccaatacagtatcaagctggaggctgtctcagaggtgggaaagttgcaggcaagagcacagaaagtcagaattcttagcaaacagctgttgtccaactgaccaggagtgcaaattgttctactcgcaaagctgcttcacgtatgtacattctttttgttttgttttgtttttttgagacagagtctcgctctgtcgccaggctggagtgcagagccctatcagctcactgaaacatctgcctcccagattcaagcgattctcctgcctcagcctcccgagtagctgggactataggttcgcgccaccatacccagttatttttttgtatttttagtagagacagggtttcaccatattggccaggatggtctcgatttcttgagctcatgatccgccaaccttggcctcccaaagtgctgggattacaggcgtgagtcactgcacccagccatatatgtacattctgatgtattcatggcacttttgccctggtggcctaaatttagcctgatgttaccacttgtggcaggtcacaggctggatgccgtatctgggacctagggttttaatgacttgcctggatattggtgtagtatgcatgccaactgatattcaatcaacatctcctgccagcataaaaaagtttaaggaggtgagttactacttctatcctatgaaaaataacatcatttaacaaaacatctccaggaggcctactatgtgccacacaccattctagttactggagatgcaatccctgacaacgactgctctcacagagcttgtgttctagcagggtggggctgggggaagaggagttatctctttgtgttctagcagggtggggctgggggaagaggagttatctctaggtagacaaatgagtacttaataacatttcagatatttataggatgctttgaaaaaagtaaagcagcattgtaggctagaaagagactgggaggtgctgtctggaaagtatgatccaagaagccctctctaaagtaacacggctagagataagaatgacaggtagggccagctacatgaggatgctttgaggttgtgtacccactgggcacgggaaactaactactttggggatttgaagatataagagatagtcccaattgtaatttcctggattaattagagagaagatataaaatgtaacccatgaaacagtgtatttaaagctaagtggtaagaggtgcaaaatgctattgaaatgtaggggagaaggactagggtgtgtttaagtgaccaggcaagtcccgtcatacacacataggttgtgcttgggttgggcctggaaggatgcatgggaattccagatacatagagaaatgatcagtttctctctctagtgtgctttaaacccggcaaaatcagacacaccggggctgaggctctagaattaggatattcataaggttctctgggtgatgtagctgtggccagtctgaggatgggtgttttgatcccagatcgaagttcctggggtcagcatctgtgcctcggccactcaactaactgtgccttccccacctccctattctagaattcacttccaccctgggcccagtttatattcctctggcttgttgaagggagctagcctcccaggtgacctggccaattacaaataattaggagccccatcacataacagtgctttatagactggttggctgtctcctggtggcacccaggcacttgcacttccgtgcggcccagataactaactccaggtcttctgcaggaagtggggatatgtgatgtgagctccccagtgggtcttccttggtcacagtttctaaggcatttcttacagcttatgtctccggtttccctggactattgcagagggaaaccaataatggtgacagcccctgctttattctaatgatcagagagtgaaagctagtttcttcctctccttgggggttactgtaataaccctgacattgttgtgaattgcaacattggcatttatacaatcaatgcagtggtcaattctagagattaaatcaagcagagtttgatatgtacagtggacattaatatgcctcccccaaagcattgtaagccacatggggccatccaggcatgcagtgggtggacaggaatgggaggcattgaaccagaaggagaggcagagaaaggtccacggctggcctcctggcttcactagctcagtgaatcaaagggccagcagtgactaaacatttgtatttcctgggaagttggggttctcctctaatagagtgactgtgttctttcatttgtctcctttgtagatagaggtttggagttggaggaagacactggcctgttgctcttactaatctctctctagccccttgtaatgattatttggggagatcttttctctgaatgatttaagcaaaacaggcccctccagaaatgtccctggaaagtccaaggcagcattggacaggggtcagcaaactttttctgtaataagtcatataatgaaaaatttaggtttttcagggtataagatctctgttgctactgattagctctgctgttgtagcataaaagcacccataggcaatacctaaacgtatgagcatggctgcattccaatacaactttatgggaatttgaactttatgtaattttcacagattatgacattgtcttcttttgattttttttcaaccattttgaagcacaaaaacaatttttagctcactgaacatacaaaagaatgtagtgggccagatttggcctgtgggtcgtagttttccactcctggctttaggtagcatgttccacctgctgatgcacggacatctcactgataagtctagaattctaaagtcaaatttctcccactgagcccagtgcaggcatctgaccattttatcatcatctcagcaagcaagccagaaaaggcagctcatttaatcaacaatttcatggaaactaagacttctctttccaaatagcataaatattccttttcctttttattttacctcctgaaaattattatgaaggtctgctcacacatatttatggcatacctttcttaaatcttttgtcaaagaaggtagcaatgtgtatggctatacatttggacagatttattacaaaaatataatacatatacacgtgctcaaattatagctctatatggcatgtatataacattgatgaaataaaaataatagcacatagtaagctctcagcaaatatttgcttgattctttgcacaaatgatttatttcactccttacaacagccctatgcagtcttctctctgactcttacccacttctccctgttgtagactcgaagtgaagctgccatgaccgtcctgagtggccatgtcgtggtctgcatctttggcgacgtcagctcagccctgatcggcctccggaacctggtgatgccgctccgtgccagcaactttcattaccatgagctcaagcacattgtgtttgtgggctctattgagtacctcaagcgggaatgggagacgcttcataacttccccaaagtgtccatattgcctgtaagtccaaggtcacattattgatgccttttcttcttttcattcacaaaagaaaatcccggatggatataatagttgtagctttgatcatgcctgtgcttcttcatctgggtatgggcctgaggactcagcacttcccctatgctctgtcaaggaaaatccaaaccctgggagaccttattaaaaggaatttgcagccaagttcagtccctcatcagggatgaagtttagcttgtatcaagtatattaaccatatcagcgtctaaacactctcactcctgcctatacaaaacctagagcattgttatattatgatgtttatagtaaggatttgcttacagaactatttatagcattatacttatggcatttttaatgcttgaagaaacattgatctgtgccaccttctgtttttaactaaataaatgcaaataacagagttctttatttctgctgtacagaaggccaactccttctgcagctcagccccaacccctgttcatttagaagtccagcaacgtgttcatggttgtgtttgtgtgtgtgtccgtgtgtgcatgtgtgcatgatattcttgactgcaaaacattaggacttcagtctgaaaaaacagtctgggactccacaatttagtgtgaggatatgggatttaggagtcatgtaattaactacttcctaatcataatgaatgcatagtccacaaactctcaaaacattgtagagaattatgcatttcaacatttgatgtaattctccacatcacaaattcatgcaaatctcacttatcctccaaatatttttcttgtaagttcacatccctgaaactgagaaacaggggccaggtgcagtggctaatccctgtaatccctgcattttgggatgctgaggcgggaggaccacttaagctcaggagttcatgagcagcctgggcaacatggtgagacctcttctctacaaaaagttaaaaaaattagcctgatgtggtggcgtgtgcttgtagttccagctacttgagaggctgagttgggaggatcacttgagcctgagaggtggaggctgcagtgggctgtgaaagcaccactgcactccagcctgggcaacagaacaagagcctgcctcaaacaaaaacaaaaacaaaacaagaaacaactgaggaacatggatttctctacatgttaagaagtctgggttttcccccacttacaaagctaaaatgtattatttctgttatcagcttccaaaacctcagaaatggggggaaaaagagccaagtaatataattcattaaagaacacacaagaatctatccacaagcagtacatgttactcattagatgccaccatgtgcctttacataatgcctgacacaatagggactcaataaatatttaaaggagtgagaaaaagatcggacagttatcttttggatgctgggccaaaaacccactgccttagtgagcacaggcagttgaaaatagtcacctatagacaaacagtcatacacagaggagagcataagcatatatatgctttgctcattccagaaatatggtcgatttgattatatgattccatggttatctttctgtcatgtgctcctccacatagtcccctgacctctgaaagtgtctttgtaaagggtttattattttaccaggatacatgagtctgtgtgtgtatgtgtgtggagagagatgggtatatgtgtgatatttggtatttgtgtgtgtgttttgtgtgtttgtgtatgtttcctcctgtgtgaccttttttgtttgtttgtttttgtttgtttgtttgttttgagtccaagtttcactcttgctgcccaggctggagtgcaatggcacgatctcggctcactgcaaccttcacctcctgggttcaagcgattctcctgcctcagtctcctgagtagctgggtttacaggcatgcaccaccatgcctggctactttttttgtattttcagtagagacagggtttcaccatgttggccaggatggttgcaaactcctgacctcaggtgatccacccacctcggcctcccaaagtgctgggattacaggcatcagccaccgcgcccggctctgtgtgcccttgtacacgttcactcatctttcttcatgtatatgaatgagctgtcatctttgcaggtcatttcaaaccctccaaaatttaacatactcaagcacaatagattttcacaaaatgggccttcacctatgtcttcacagagtttattggttaaacagtaccctgcctatagggccagcccagagaaacataagcgatttctatgtatgtcatttgtatttcttgtagtttgaaatcacgtgtgtacaactgcacagggatcatcttatatcacaattacggctggcttccctacaagatgaaaattaaaagaatatggatgcaggcaattgaagcttatgcactggcaaaatgattcaggaagttggttggacttgttttgtaccaagagatcacaggagaagagggcattctccttctctcaaaaagacgctgctccagagcttggaactagttgtgtctcagcagcaaccacagtgctaaatgccccttcctccatagttgcacaatattttagggcctgagaatagaatcatgactaccagtgactcataaaagagggtagataggctccatctctgcagccaagtctctttccaaagccagttctccagaaagggagattagaggaggacattcccagatatgtgacagttggcaaacccttggtctacacaatcagtgagttgaaggtaactcaggtcaccacacaggcaaagaggaagctagattcaagctagaggaccaatgaagctggtggccagacaggagccccaaaatgatgccgcgtggccactggggagctatggcatggggtggcctgatgattttgctgtggcttcacctgaagacacagagcatgtggaggccatggccctgtcctaacctaacccttctattttccctatgcttgcattcccggactctgttgttacttcctggatctgggatttttccactgtcttttgttgttattttttatgttaaaaaatctgtttactggcttatttattttttaaatgtacctgtaatatacaaatatgttcttgttataaaatattcaagcaatatagaagtatataaagtgaaaagcaaactttcccctcacccccacgaatcctatttcccttcccagagggaattaccattattagtgtaatggctatttttcctgtgctttccttccaaatttacatacatttatatatatgtaattttattttgtgggtttttttttttacataaatgaaactatacttttttttaactgctgtagaactttttttttcacttccccctctatcttaggcttctaaaccaatgcctgcatggagagccagctctgcctctttacctcctgcatacattttcactgtgtgcatgtccaaaagtatatttctccattcctatgttgttggacaattaggtcatttccctgtgtatttttttcttgctgaaaatatgcaataaaattatatgatctgaagcttaactcctttccatatctcttttgcattgcacacattaattccactccatccatagcctccaaattgagccgcacatccaggcccacctcatcactctgtgctcactggccatttctccttggctgcattggaactgctgtcttttgcctgagacagaagtgacccgctattaaataaacaggcatttgaaacccacccccttgttacattctgaaagccagaggttgccacaggacagttacttaaatcaagacaatttccaggcaggaagaagatgtagaaccctggcattattcctctcccgcgtttgttagtaatagcttgattgagtattgagaacaagcttaaaatgctgccatcagcaccgactaccctttagattagcacacagctcctattcccttgaatgtagttaggccagcttaatgtcaaggcataaaaaagatacttgttaaataatttcccaaagctccgactcaatctttaatttgttttcctctttccctctcctctcacttttgctcctctctctctctctctgtctctttctccccccatctctgtttttttttctttcctctatgccaaagggtacgccattaagtcgggctgatttaagggctgtcaacatcaacctctgtgacatgtgcgttatcctgtcagccaatcagaataatattgatgatacttcgctgcaggacaaggaatgcatcttggcgtcactcaacatcaaatctatgcagtttgatgacagcatcggagtcttgcaggctaattcccaaggtaaggacagcctgtaatacttctttgctgtgcctgcaggggacaggggctggcaagagggatatccttcactcagtaattcaaagaggctcacatcagcctgcctggcagtgaaacctgcggtcaccatgatggctttcaaaggggcatctgctgcctcttctttccattccagaatgcaggcttgagacctggtcacccacacacagactaggttgcctttccagaggataaacaagcctttaaatagccaccccctcagctttcccaaggagtggcttcatgaccagtgtcatcagctaaatgtcagagcactgaaaagaagctggctgcacaattctgaccgtttccttccagtatatgtttttgccattgagctgggatgggaatgaagctttgctattgttagagccgcctctaggactctgctgaccaagggatggtaatctctggagagtggcaactctatggacactaaaagtcatttagcaaatggtgacacttgtcagaccacacattttcctataggaggcaaagcagccttaagtgacacacgtctgccttcctactctgcccctagtctttcctgtcatttgctttgggaccctgggcaggtggttacaagtaaagatgtctaggggtctcagaaaggcaacacagcaaaaccttcataaaaaatgacctctgtaatcaggatctggcaggataggatgcaaagcattttccattgagtgacacctccgtgtaggctagccatgaattggaggatagttgttacagacgagctgccagagggtggcattggctgcctgatggggaccagaatcccatcagtccaggatggaagggtgtaggagcacagcccatgagagctatggctactgggatatgaagcatcaccttattgatagcttggcaagtgtctgacctcctccccatcatgccaggctttctagaagctcagctgaatcatgcatcctggacctgtgagctacattattttttgtcaacttgacatcaccaccactgccttctaacatttgcttagcattgcagaaaagccaggaacaatagttcctggaatcctcttccctgcatggctctgggctagagtcagctggtgggagatgggcactggggtgagatttggaaagtggaggagaaagataggctttgattctttggaggcaactgcagccagaccctggcagacccaggttcaaatcttctatcagatgagctttctgggagccagtgtcttcactgctacagactgagagaggggctggggcttctctgaggatcttgagattcacagcagcttctggtcaagcttaagagaaccttcccctttggtggtgcatgtgaaatggcttctgtccttctgacatcaccctgatacagcctgaagcctaattttgacctctccatgccaccgtcctccctgccacacccaaatctaaatcttggtatccacctgctcagctgtgcccgcaggacagcacaacatgtgaaggcctaggagaggctctgagcttactcccagctgcatcctgaagaggtagagcccgcatcctgtgcggcctgcccgggtagcacaggcgagaaaggatgtgagaagacagtaagctgaccttctaggagttgaaagaggcaagccggcatttggttcctgcctttaagcccttgactttcaatatgtgtcctctctgccctgccccagtatgggtgtctgttgggggaggctgttagagttacagaacctcatgggccatcccagacctgctgggtcagaatctgcattccaacaagatccccaggcaactcaaatgtgcccttttaaagcacagtaaaccttcacatgaacaggatgtgaccaacccttggtagatgctcctcctctcctggggaggagtgaaccatcaaggggaaaggaaaacagtgaaagcaatgattctccctttaagtacagacagaagccagcaggaggaggcaggaaaacactccctttccccaacatgcctgtttcctccaaactcgatcatgattttccagggccacagattagaatgtcagtgtataatttagttacatacacatctgatatagttgttccttccagttctcttaaacctcatcccagcctcttagatcctatataaaggccaaactggtaacaattcttccactccccggtgcccaaaagccttctttattcttttatagcacaggataagcaagaaaaataggttttgacaggagatatggaggaaagagaaagggagcttatttttcctccaaagaaaaaaagggcactctttcttttgtatacacacatgcacacagttatggtctgaatgtttttgtaccctccacctactccctgccaaatacatacattgaaatcctaaccctcaaggcgatggtattaggtggtggggcctttgagaggtgtttaggtcatgagggtggagccctcatgaatgggactggtgtccttataaaagaagcctgaggccaggcatggtggctcacgccttgggaggctaaggcgggtggatcacctgaggtcaggagtttgagaccacttggccaacatggcgaaacccaatctctactaaaaatacaaaaaagttagccaggcatggtggcgggtgcctataatcccagctactcgggaggctgaggcaggagaatcacttgaacccgggaggtggaggttacagtgagccgagatggcaccattgcattccagcctgggtgacagagcaagactctgtctaaaacaaaataaaataaaccaacaaacaaataaataaagtaaaagaagcctgagagagacccctcgtcccttctgtcatgtgaggacactgcgagaaagtcctcaccagagactgaacatgccagcgccttgaccttgaactttccgttctccagaactgtgggaaataaatatctgttgtctatcagccacccagattatggtgtttgttacaggagcccaaatggactaagaccgcacaaatgacagaagaaggcaaaggatgtgtttctatgctcagcagtgattctcgtagacccctggtcagcagtggagaggagcatctgtctctcactagccagcagtctgttctgctccctaagagagagtgtcaaagctctaggcccaccaagactttatgtcccattgttttcttgtctgtctgtctgctcctctcttgtttttgaatactgttctctggtgatactctaaccttgtaaaggcagtggtccagtgggagccatcaacacagagaaatcgctccttccccagagctcacctctggctgcagacccagcactccactccttgggctcctcccagcctgtgagctgactctgtgagctgagtttccctgcttttctatatctgagacccttttgactaactggagtgcccactggcctgagatacttttgtcatccttcatctgggcatttggcatgatcaagctccaagggaatagggattatggggaacaaaaaggatttcatgttactctccattttttttcttttcttttctttccctccttccctccctccctcccttccttccttccttccttcccttccctcccttcccttcccttcccttcccttcccttcccttccctccctccctccctcccttctttctttctttctctttctttctttctttttctttctttctttctctttctttctttctttctttctttctttctttcttccttccttccttccttcctttctttctctctttctctctttctttctttctttctttcgaggtagagtctctctctgttgcccaggctggaatgcaatggtgtgatatcagctcactgcaacctccacctcctgggttcaagtgattctcctgcctcagcctcccaagtagctgggattacaggtgcgtgctgccacacccggctaatttttgtatttttagtagagacagagtttcactatgttggccaggctggtctcaaactcctggcctcaggtgatccactcaccttggcctcccaaagtgctggggatttcatgttactcttatcattttggaaaacaaatctaacttcctctgagtgataactacacagatttctggccactgacaccttgctttccctcttatgtattctatggtcctttatggaacctcatgctctgcattgtctgaagaactgtctccatgtctctagaacctcactgggtagaaatgtggactcaggacaaatgtcatgctcttgggccagaatatgcatgcaaccctatggaaagctgtcctaagatgatataatttagcatgaaaaatgtgcattcacattgagaaagtagagccttcattggacagctgccactgcatgttattagggctcctagactaacaaagcctcttttttctcttctgttctcttttcacactcccttttgatgtcacttttctagcccacatggtgtcagaactgacccagcctagggattctggaccagacactttctgaaaagacccaagatgtgatggcttgttgtcaaaaacaattacagaaaaggtggcatatcccaagccagatggtatatccgatgtgacagttgggtctatgagatgcagttttaatatacagcaggcaaaactgcagtgacaattatataaagcagatgaagctgcttcttgctggtcagcaaacatcagctcagaaccactttacagctctttaccagcaactaagtgcctttatttacagagtgcctgtcacttccctttggctggagagctggtgtattatttagcacgcatttatctggggaaaacatttcaatttaaatcagctggtacaacagtggctcttgccagactgtttccctgtggttcaaaaagatgagaactgagtctgatcttggaagaaagggtgagcagagggaggcaatgtccgctctctgagctgcttcagttcatacctgaaaagagggagcatgccatggcatttcccattctgctttcatattgttttgaaatgatgatcttgtagttgcttcctgcttacccttccatgaaaggtaactcctaaggaaaagaaaaaggaataaatggctgttctccatgcatcaggcactctaaaggcccagaacacaaaggtgaccaaaggttgcttggattcagccactcactatgcttgcaggattcaggtgagtggaggaggtatccccataaacaatgacagtccaaggaaacaaggacgaggctagaaatagaggaacacaaagggatccttggtttaggtattttgaggaattgagaaggctttcaagaagaggtggcatcggccaggcacggtggcttacgcctgtaatcccagcactctgggaggccaaggcaggtggatcacaaggtcaggagatcgagaccatcctggctaacacagtgaaaccccgtctgtactaaaaatacaaaaaattagcaaggcctggtggcacgcccctgtagtcccagctacttgggaggctaaggcaggagaatcatttgaacccaggaggcggagcttgcattgagccaaaatcatgccactgcactccagcctgggcgacagagcaagactccatctcaaaaaaaaaaaaaaaaaaaaaaaaaaaagaagaggtggcatctgtggatgacttgaatgcatgtggctatggagcacttgaaatttaggaattaaatttttccttttaatttaattttaacaaatataaaaatttaaagtgatccatagccagtggctaccatattggatggtgcagtcctagagtgtagacttgtcttgctaagggtttggatttgggggagtcatcaaagatttataggaaaagagtaattaattccatgcttgaaaaagataacaggtggaggcaaagtgagctggcttgagacggagcgaatggaagtgacggcaaagattcctggggatgtgttagagggacagggacaagtacaatttggccccaatacagggtacatataaggcagcagggagagatgaagttgaaatgtgggttgggcattgaggaatttcttttctttcttgagttaggaagctgtaaataattttttatgtgtttatgagttaggaagctgtaaataattcactaggcactggggagctacagaaggtttcaaagcaagagagtgatgggattggacctgagctttagggagatggatctggcagccctgtgaagcattgtttggagtggaaaggaagaagatgcaaggactctggttaggaactgtggctatccagatggaagcctgaaaccttggactggaaaaagaatgggaggttctagaaggagtcactgtacatgcaaaacagtctgcatggatgtgtgtttccttctgggggtcagaggatggcagagtggagggacaggctgcaggagaaagcagtgttgggaggattgggttttagtcatggtttatttccacggggacttagtggaaaatccagatgggcatgaaaagctgaagggtggaaatgaagtccttaatccaggaaaagtttgcttctagcaatctggcccattgctcatgctctaggagcaaaggagagcctcagagagagggagagaggcaagagaattgcaggacagaagtataccatctcagaaagagagggtagaggaaaactttggtagaagccggagaaccaaaagctgagcctgtcccgaatgtcccaggggagggaggagccaagatctcaaacccaagacatatgtccactgccttttttccatattttatgctttatagacacacagacacacacacacacacaaacacacacacacatacgcacacacacacacagctttcctcccgccctctttgacctgaagctatagttacactaaatgaacatccacatataagcggacaccctcctttctccacatttcaacaaaggttaagagcctcaagtagggaatgacatttttctttggaagtatggcagcagtccttggagagatagcattaattgggggcatagggtacaccttccctatcctaaagtctgagatgtcttttactgttccaaagaagaaaatgtgatttctcttttatctttgtgtgagacagtgtggattaggatctctaaattactggatgacaaaaagcagaacgaaaagggccttcctaaagtggaactctgggatgaaatccacaggacagaatgcattgaggacctctgcatgttaattttcaaatgatcagtaaagacaggctagataaaccttggtgataaaagcatcatttcttttgagcagtgactgtttcatctttgttgggataggagggaatgtgtcaagagctgtgaagatttgaagcagaaatttgacaaacaaacagaaaaatgttgtaaagaggacggccagaatggggcagtgcctggacaacatgtcacttgccaagtggttaagagaacaaagccagcaggcttaaagggccatttaatcttctgctccattggacaaaaaccagggccaatggttaataattaaggagaacaggattttagcccaacataaggaagatatttccagaacagcatggacagcctgcaaatgcagcgagcctcctatccctgactgtctctttgctaaaggagagttactgacacgctctttgtgatgggagggagattggtagagagatgagttctgtggtcctttataactaaggatatccagcatgttcttgatttttattacatagggatctgtgttttatatgatttgcattgtaactccagagggagagctatggtgtttgtcaggattggggtcatgagtcttttagtggaagcattcatgtccttcctgaacggcactgtctttgtgttcaaagatggggagcggacggcattggggtgagcagctgcagatctggcttttccattaattggacagaccaccccatcttcaacttccacaccacccttccacacctgcctttttcccagggctctgccttctcccacttctacaagcctggctttcctgacccccaggctgctcactgtttcttgcagacgcacctatacatgtatcctcacacacatttcccctccttgaagtcagagaagaattttttcagctgctcccatataacatttcattaccacaatattctctctcaattctgaaatggtgataggggagaagccatttctctttatacccactaaacgaacaaagctcagcgctaaaatatttttcttccattgtaactgaaactgctgttggcttccgtcccaaaaaccagaaagacaattatacttaactgtttagagatttataaataccacactggagtagcctctaggtagtaactttagatatctaccccaataattttcttttattggtttgtgatttagatcttatcttgagtcctctataataagagtagtacatttcattaaaagagcttactaaacaataaagaaaatctggcttagggctctgagcagatctcaagtacagaaaggggcctgccctgttacatttcttccgtggacatcccaagatgaatctcatcacaagaatctcaggtgcagatgtatttcagcaaagcagcaattgcagctgttttctaaatgacttcaacttaagagaatttttcctatatagcatatttcatcacatgagagatcctctttaaccctgccatttactattctagtaatgtattcctagcaagagaaacaaggaaaaacaacagcagcagctataataagagactgagaaacttggactactttttgaactcatggagggttttatgccctccatgcatgaaagactttcttggagagtggatgtgcagaagaaaaagtaaaaacagacagaatcatcttttccttccaaatggatgcagagcagattcatgtccccactcaggctgtgcccggcttgtgacaactgtcgtgaagggaaatcttagcttcagagacagaaagcagattttgggtggtcttggggttggactgaacttatggttttagcatctggctctcacatgccagtttactcctcaaaatttgtgtgcctggttaatgccttttttaagaaaatgtaatttttttttcaggtgagccatacaccagacacattcctatgtaatatcttatttaatctccctgacaacctgctgagggagagttaccaccttcattttacagttgagaaagcagagattcaggggaattaggtacctttcccatagccttatagctagtcaagggcacatggagttgatctccaaacatctgatttcaaagtctatgcttttctcggcacatcagcctgtctcttaaaaggcaagtgttatcctgatgagaatgggcctgaagctatacatgtactttcaagggtcatgggggcacccccaggacaaacactcaaggggatgaaagtgctcaaggtgtgccagcctcacttctaaactggtccttgcacctaaggggctgaagtttgttttcaacggttcttgtctctgtgaatccccattttttgagccccttgaccctagctgttccaacaatgagagatactaggattctgttggcttcagtctttcttgctactaccactggacaaatgagtaaatctgggggcaatgtgaagcactgtgcttagcctgtctctgtgaacagtatgactgttggagtctttcttttctgtttttcttgtgaatatagatgggacttcggagctgtaaggaagagagtggaatatttgagacctagctgttactttctttgtgaagacacttaaataacattttcaggttttatttactccttccatgctcaagcggaagtttccgtgacagcagatgagaatgaagagaccactgtagcgcccaaagcctaggctcagaaaatggtccagagaaattgtcttatagtggggaaaccacagctgtagaatcagagagaagtaaaggaagtcttgtaatcccatggaccctctaagacacctcatgaaattctggataaggataggtcaactaccttatcctgcatgtcagtttggtttgcatcctatgcatgaggttagtgcccctgttgtctccatagtctatgctgtcatagaagtaatggggtctacaggcaaaagggacagaaacataaaataagttgtatggaatgactttgacacacatacttaaggatacagggcttggaacatttcagtgtattccttgtgcagagtgtgagccatttcattcaatacacctgctgtgaagatagcacacatgcctcaagctggcagataaatctagccagctattcagtgcatttttgtcttcacctattctctataggcaatagctcatgtgcagtcttaaaaactttacttcttttcttaaaagcaacaagagcgaaattccatctcaagaaaaaaataaagaaataaatggccctgaggccagatgcagtggctcatgcctgtaatcccagcacactggggggccgaagcaggtggatcacctgaggttgggagtttgagaccagcctggctaacatggtgaaaccccatctctattaaagtacaaaaataagcctggtgtggtggctcacatctgtagacccagctactccagaagctgaggcaggagaatcacatgaacccaggaggtggaggttgcagtgagccgagattgcgccattgccctccagcctgggtaacagagtgagatcccatctcaaaaacaaaaccaaaaacaaacaagcaaaaagaaaaagaaagaaagaaagaaagaaaaagtggcactgcaaagaagccaactgatttataaatgactttagttctggatttattgaacatttaaggatatggctagtccttaaatgcttcaattatacttcatggaatggtctggaggaaaattattttctgaattccagaaaagcaggatagtccttgagcatcttgttacagatctccaggagagatgttctaccagatgttttcagtgtcccatgcatgctgccacacaatgtgttatgagaaggcagaggtggctttgggctgtggtagtcaggaaagactccagagtaaagggaccagaatttgaaaataagtgtgattaatataaataaaggttccgacaggcatgtggaaagggctgaagctgagtaacagaaggcacagaaacaggaaaggccgagtgtttttcacagagggtcacctggctatttgtgtactaatggtataaccaaggtacttaaagggctcactatgtcaaaggaaatgcttgtaggtgggtgcactgttaacctgagtagatcctccaaagaagagcctgttctattgttttgctgacctcttcatgctcgccaactgccagaaatctttctaaatgcttagcacagtacctcacacctagtagacactcagtagaggtttgtggaggggatggatacatgaatacatgatttaatcctgctatctgttgtttgcagcctgttctctcttaacgtgccctcaaatgagataaagcagccaaatacctgtattaaaaacctacactttccctccaggatttagtctcccttcatttgacaactgggcactggacaagggttacagagatcaaagatgttgcacttgtctggaggagcctttatcagatggccaggttgtctctaatataaactgtactattcccttaacctttactaatagctcctggccctcaacctttgactggcctcgctgaatgtactattacacagtaccaacccagggcccaaggctgtaggactgagacctccaaagttcaacaaagggcagaaaatatctctgctttctgctccagggagctgtgaatgcttcctgagagcttccctggccatgtagaaatgaacattcctctcagcggtagactggagcaggaggaacttggaagatgtgttttgttgctctagttcatgatagtgaatcacaaacatggctgtcagagtaatgatgcagtcatggagggttaaggaacagcttttaaatcctggttctgtccatcatgagcaatttgacataataaagattccagatttcatttcctcatctatatatctatatattaaatgaccccaccccaaaacaccgagggatcagtgtatgaatacaaagacataatggctgcagaaaggttattaaacatcaaaggctgtagaaatagcactttgcagtcaagttcagtcatggcacacatgggtctggaatgacagcttgggtttgaagcccagatctgccacttactaggcctgggaaaattactttacctctttttatctcaattttctcactaagaatactaaatgcacctggcttatcaaatgactatgagaattcaatgagatacaggactttctattgtccatacagtacctttaagtaagccagaaaaagtcactcttttctcaagacaccttattttcatctgctgaaaaaaatggtgataatctactaatatgtttgaacaatacacttttctgtcatctgctgggaaaaaatattgtcataaatatgcaaatatacaatgcctattgatatgagtggtacccacttagattagctactgtgtagtgcccaaccttcacaaccatacatggcaaccctgaatgaatggctgttaaagcacttcctacctaggatgggagaaatcaagcaatgttagctatttttgttattattattacaattttactattttatttcatcccctcctactcccagattaacaaatcataagttaggattatccacttgtacctagcagccagaattactgttgatctgtttgtctgtaaatatgcatagaaaatagatgatgatagaaaccaacacacctttggaaggtgagcagaccaggtaaggtagactaacaaaagcctacagaggagttgaggaaggactagggcagatgaacagtgagcatggggcgcttcccctccatagacaggctagcatggcgccatgcaacgcagctgctctctgaagcagagattgggacagctcgctgacagaaaacctcatacacttccaacctctggggtttggttgtggtaggagccctgatgttggtgaagtgacacccttccagagcaggacccatgctactccacctagtcaacagatggcacttggcctccctcctttgcctcttttttttttttttcttaaaacagtaattttgggtctcagccagaaaacctatagcatattagttctcaactgggaaaggggtcttgtacctacccctttaaatagctaataatgaatcttctctgtgaccctcctcctacctcttcatagacacataaatatttatatacaaatttaagagttttgtctaccctaatgattttcttcccctccaggtttattgaaatacaactgacaagtaaaagttgtatatattcaaggtttacaacatgatgatttgatatacatatacattgtgaaattattaccaaaatcaagttaataaacacatccatcatctcccatagttactattgtgtgtgtgtgtgcccgggtgtgtgtcatgaggacacttaagatctattctttttgcaaacttcaagtgtactacacagcactatcaactatagtcaccacactttacattacagccccagaatttattcatcctataatggcaagtttgtatcctttgaccaacatctccccattccccctgaccctcaccacagtccctggccaccactgttctactttctgcttctatgagttcaactttttagattccatgtataagtgagatcatacagtatttgtccttctataactggcttatttcacttagcatgatgttctccagttcatctatgttgttgaatgacagaatttctttcttttttatggctgaataatattccattatatatatgtgcaggtacatacacaacacagaccatattttctttatctactcatctgtcaatggacaccagtggtttctatatcttggctattgtgaatagtgctccaataaacatggaggtgcagatgtctctttgagatactgatttcatttctgttggatatatacccagaagtgggattgctaaatcatgtggtggttctatttttaattttttatagaaacttcatactgtcttctatagggctgtaccaatttacattcccaccagcagtgtacaagggttcacttttctctccaacctcaccaacacttgttatcacttgtcttttcaataatagcaatcttaacaggtatgaggtgatatcttattgtgatttgcatttttctgatgattagtgatattgagcaccttttcatatctacttgttggccatttgtatatcttctttataaagatgtctattaggttcctttgcccatttcttaatcaggttatttattttcttgctactgagtatatgagttctttatatagatgggatattaaccctttattggctaggtggttttaaaatattttctcccgttcagtagattggcttctcactttgttgattgttttctttgctgtgcagatttttagtttgatgtagtcccgctttttaatttttgcttttgttgcctgtgcttttggtgtcatatccaagaaatcatcgcccagaccaatgtcaaagagcttttcccctattttttctcctaggagttttacggtttcagattttacattcaagtctttaatccatttgatttttgtatatgctgtaagagaagtgttcagatttattcttttgcatgtaaatattgttttctgaacatcattattcattgaatagactgtcctttacctattgtgtgttcttgacatccttgtcaaagattagttgcccttaaatgggtggatttaattctgaactagcccactgtttttcaaccttagctgcacattgcactcacctggggaacttttaacattcttgaaatgctcaggccatactccagagcaattaaattagacattgatgcaggcatgcattggtgattccaacgtgcagcccaagttgagaaacaccagcctagccccttacttactcaaggaaaccatctctgatccttgtatcaggcagctgatttactaaagcttacatttccatagaaatttatcttggaaatttatttatagaataaatcattctcctaggcatgattgctaggagatttggaaagcatataatgggcattgtgaaaatgcaagatacatgagaaattcacaaacttccacatggttcccagcagggagctagtgggagctgggaaaataaaccagggggtgtccatttgagaggtcaaggcaggtgggcacaaacaattctttgaatacctaatcagcataggaaatggaagaattttgaaaatcaatcaggccatgggcctaaaggcaagcaaggaaggtaaataataataacatcagggttgaggtttcacacttaatctataaaactacttttaacaggcccctaggtgattataaattcgtggtggctttctctttattgggattatatgggtctattccatatttccaaaggaagcccttcctattatgcaggtgtgtctccttatttatttatttatttgcatttaagatattgaaacttttttaaaaaaaactcatttctgtgagcattaagtatataccatgcaaggaagcaattgtctctatcttatgaaatattaaatcaaaatgcttcctgttccctcatgtcccagagataaatacagcagtactttgaagcccctcttggagctgttttgcctgcaaatttattgttttgtctccattttcagaaagccctgttttctatgaagtatagcactctaggtagtttttaaggcgcaaactcctctggagttgcctgtgtcggcaacaactcttatgtagatggcacacgagggatggcgcgttgatcggctcctttaagatgacaaatgggcagagagtgttattgtctttgattgcatgccttacatcatctgtatgtaggaataagagggccatactttatctttagccattttataaatatttaagtccttatagttgcctaaagatattaaagcatattttacagtagtcggaatataaatattatatatagcacaagataccaaagtagtttaatgaattcataattttctgctcacatttattggaatgtgttttatgttccaaaagttccatttaaagaataagataccattctactccctgacaacacaccaagcattggccagtgttgggggcggggtctgagttccaatgtggggaagattctattaggaagcatggaggcaggaagtctcttccctggaatatatttcttctctctttaggtctaaatatgtgtgtgtatgtgcgtgtgtgtgtgtgtgtgtgtgcgcgcgcgtgttcgtgtgtgtgtgtgtgtgtgtgtatttttctgaataaataattctggtgcttatttaagtcccgtagcatttcaaaaagaaaattttatatctcctttcttctgtttcaaggagattaattcaaataacataagtaagagcaataaagataaagtttgcaattttcccgtcctcccatctccaactcccttttgtaaacagggatgcagattctatttgccagtatacaatggtgatccagggtcttaatgtgggtagtgacttcccaatgcattttgaatatttctcctgaaattaaagagttccaagttgcattttccttttcctaaatgcaaaaagatgacagggagaatattactgcacctcttttcaattttccagtgaaatataaaggctttcttctttaatatttcacaaagttcctccagttcccagtgggagtctatgctgggtaatgtttgctaattaccaacaacaaaactagacatacaacgttggtaaattacctgaccctttcctttttaatgagacaacaaggatttcgcgaagtggtgttgtttcactggttaatggtgtcagcaatgttgtaattgtgggttgagacacattagctgaacaaccacatgtagaaagggctttctctcgacaagctgtttggagactagaaccatattatcattaagcctatgtcatttgcatgctgctaatcgcttactttattatcctgcatatccattgtctttctttaattactctttaaattaaaattaaaaatagttttaaagcccacaatgcccgagatagcatcttgattatgaagataacttcaagaaaatggaacaactggttatatattgcctggattatgagagtcccatcgttatgtactgtgcctgcaggcctcaggggcctaattgcggtggtttctcttcctttagcccatagtgtttgtttaataaatggttatttatggccttctcagccattagagcaactttggagaaagtacttccttctccttggtttgagaagtgaagttttatcctctgggcaaaggtataaaactgaatcaaaaaaatctggatgtacactagagcttgtgaaggagtctgtaaggagatcctctggattccctttgctagcttattttgttggagatcacgtttaaaatttggggtcatgaaagagacataaatctcaaagctgagagggccttagagtcattcctattttacagatgaagacaccaagggccacagccattgccacgactgtgatcgcatagcagcaaatgaatgatttgactgttagcaaatggaaaggatgcagggctcctggagggaggatcatgccttaggggctactcctgagagaggatatgatgtgtacctggagttgtgatgtgcaagctacatggttgttgtggtttaatgtatttggtgcgcatctcttgtatgaaatgttgatatgtttgttgataccgacaatgtgataggattctggaagagagggctcctgtgttccacttccttaaaagaacaaccccatgaatgactccacagacattcctgaatattgagtagctgaacacagaattatcgtggtttcaatattatgtatgatgcacggtaatctaaagggatttgggacattgctacaacctcattttatggatgggagaactgagtttggataagacattgaatccttctacattctcacagagaggtaggagttgacctgggactaaaacccatgtgttttgttttctctgtcagcttacaaccctgttgttgataaataatagtaagttagtactgatgaagtacatgctctgtgccaggtgctgttgtaagcagtttccctgtattattattattaactcattcaatcttcatgacatcttcctcttccaatttgcagatgaggaaactgagacacaaaatttaaataaattgccccagatcacaaattagaaacagaaagaggcaggacccaaactcattcagtctagccacagtgttcaagttctagaccacaaatggtatggcttatttcaggtagtggtcaaaagttattgaccacgctgtacagagagatgctcagagtcaaaccagcatcaaaccctcatctagtgaagattcgtgtgtgtatgtatgtgggaatgcctgaccccaagatccaagatcccagtttcctattcatctgccagcataaacgtatgtacaggaaacacttcaacacttaagaaaaaaagattctttcttttaaagaaccatcaactgtttggaaccttggtgctatcttgggccaggcgtcttgtctctagaaccattcagagatagctggctgaaagttgttgatgcgattctgctttcctgaatttcatggcaaggccttggatcacttggcaaacccatcttttacagctacttaattttctgtgtgcttaagatatggatgttatactttgctcgtgattttggagttctggtttctgctgtgctggccatcaattcatactaaaccaaacaactggggcccatttggcatttggtattttaaatgtaaaaggacatttgaactacatgacaaatgctgaaaaacaaagcccatagcaccaagaacataaagaaactgtttataatgaaaaagtggttacattttcagtcaatctatcactttaatgagctcttcacgtttctttgattaatgcttgcaaaaggggagaaaaaaattgatgtaatggaaacaaaatggtatatagtcttggcagcatgaggggggatgtctgtgtgttttattagtatccccttgatatcattgtcttgtaatgtatatatctgccttttccctggcatagtaagcctctagtttactggaaatgtgatccatcatgaaagaggagatcccatgttagtggcaaaacagcctttgtcctcttgtggtggcagcaaagagggagggtcccagaacaggaattaagaataaataaaaacaataaagaaaggttagcataagctgtgccatattgaaattgggaagtccagtgggtatatgaagataaaacagaagaattaaagatgcttaacaacatttaaacattaatatgtagtaatttgtatatatttagtaataattcatacattttaaaataacgaataaaggggatggaaaaaaaggcagaggaaaacatcttcataaagtaactaaatgtgagaagttattcaaggcagacgtcctggaagaggtaaagaaacgacaggagctgggttgggagggaagagggggaacagcgtttctgaagtgggtaaggctggtgggagcagggatgggcatcagcaggtgccactttccctctgtgttggaaaccagctctgactgctcctcccttcccctatgtgcatggggcattgtgggtttcttgggctcttcactgcccatgtgtgctttatgtaaatggcctctgctctgagattgagtagctcttacaagatggtgggaggctgaaataacagagaactaggaagcctgaaaactctctctgggccctgttcttttaaagcccctttgctttgtaaccttggcctgatcacttccatctcagaacttcagtctccttaactgccaaatcaagtggatgttcaaagacctgtcagacccttacagatgaaccagctgtgtccatccatcatgttcatcagctgctctcaacccatagagatcacatgaggtttcgagatttcagggtctttaacatcaatttataatttaaaaaatttttttcattacataaataaaatgtgtttattttagaaaatttagcaattatagaaaccaaaaagaaaatgcacattccctgtaattttactgctcagacataagaaagttgacatatttgtcttatttccatagatataaatacttttaccctcaaaaaaatggatcatacatgtcagtatgttacctgtggtttttcacaaacattttatcatgaccatttttctgtcgtgaaatgtttttctgcattatttttagtggatgcatacttaaccaatttccctaaaattggacattcatgttgttttcagtggaatgttgttacttaatacctatgaatgaagaccctggcagccaaatttttaatgtaaggaaattatggctgtacacatatttttagaagtacaattgcttaggccaaagtggaggtaaaattataagtaatttgatccacactggccaagcaagtatgtctcattatattttattttttgagacagggtctcaccttttcacccaggctggagtacaatggcacaatcttggctcactgcaacctctgcctccctggctcaagcaatcctcccacgtcagcctcccaagtagctgggaatacaggcacaccctaccatgcccagctaatttttttgtgtttgtttgtttgtttgtttgtttttagtagagacgaggtttcaccatgttgctcaggcttgtcttgaactcctgagctcaagcaatccactcacattggcctccaaagtactgggattacaggcatgagccactgcatctggccttatctttaaattgtaagatgaattaagataaggtaaaactgagaagttgagatgttgtggagaaagcaatgataccatgagctcttgggtaaacggagacattagaccgggtgaatattaggtttctctccaaatctgtagttttaggtgtgtttgagttgttactagctttgtctttttcttccttcctccccttaaccaacccttctgagaaacatcttacacagtaagctctttaagcgaattctttttttctttttttttttttttttgagacggagtctcgctttgttgcccaggctggagtgcagtggtgcaatctcagctcactgcaagctctgcctcccgggttcaggccattttcctgcctcagcctcccgaatagctgggactacatctttaagttaattctaaggaaagagactgtctgcttggagagacaagtcctgtaaatatatttgtttcatgtgtgtgagacttgtctaagagctgaatatattttacgaatcttaatgggcaaataactatagagaagttttgtttgtttggttggtttaatttgctttggtttgggttggacccaaaatgtaaactctaaaaaggatggggcactttattcagtgggtggagtcaacttgcaaaggtgctaatcaaagacagtctctaaaaaaatgtaccgctaaaaatgtcactgttagttactgtaaatagaaagaaacaaggagagtattaagccaggtcttgtccctggtcactggagacaagcaggaaaccttaaatgaagatgcagtcatttgtttcagtagaaaatcaggccagcatgaatcatttcaccgcgaagagaatggagatttttctcagttgttgtactagttgggacattttggcacaagtgaaatccaatgcaaaaaggcttaagtaaaaacagagacatataactggaatgtctctggttttaggcacatttgtgtgcaggaacttgaacaatgacagagctctatctcattctctccacctcttggttcatttgccctgttttcattcaccccatggtgggctaactgcttgccagtagccccacacctgcagactcctgactttgcaaccacagaacctttaccatcttttacataatgtcctggggagaatacggacaggccctagattgaggaggacagactcatctctaaactgatgatgtggccaggattatgcaggaccatcagcggccctgtgaagtcaggatgcctggcttcatgttgccacttctgtttccagggtgggggcggagtttcttccctgcacccccaacaaacactgtggaatgggtttcttatgcatagaaggagttaaaaaggaacagaaaacagcagatatcaactatcctggttctgctgctaactggttctgtgaccttggatataataacttctccattctaagcctcagtttcttcatttgaagaatggaggaattgattagaggattttgaaaactctcgtgtttctagcatagaatgattgctgaagaggcaaaagacaccttatggtttggctcaggagtcacagaattatctgtttatacagtttccaagcactgtcattaggctttgtgcgggggagtcacaaattggcaggggcatttccccgcttccctccttgacactgacctccagcaccttgttgggggctacctctaccctgttggggtggcctttggggagtttcaggagaagctgctgccttggtaaataatcttttttttattgagtaaacatggtcagctgcctggccttcctgactctggattctagcttcataggaagccactgaaaactactgtgaaaaaatattacaaggttaaactgaggtttttcctttggctggatttttcttgcagtcatttccaaaaacctgtttcccaaatcaacctggtgtgtgtggattttcttcccctacaagttagaaagcaattgtgcttctatacatggaattttctttacttcagctgctgaagcattcgttggaatacatactgcaaaaatgactgctgtggctattaccgtagttgctcaggggagctattcagatgcctcatttattggagcttaatagattaaaagtccaaattgagtctcatgatataagcctaatcaagttctaatctgcataattttcccataagcagcaatgggaaatttggataatttatgtttcagcagttgccaatcatgtgttaaatagcattgttgcatttacttatcaaaatatttttattgatctgcacttcatctgacatttgcctttgaggtttttttccctggcattaacaggaaatttaattcatctcatagatgatgtaatatgagatgtttctcttgattttaacatgtctttatagatcatttttaaaggtgatctttcccttttacaacttcatattgaatacctgtctcagcaaacctagatgactcggcctaatttatttccctagtttaacgtagcatatggatttctaaccatcatttatatgcacacaataaaagataatttggcccaccatttgaaccaattcctttatgttaagtctatcggggtgggagaagcacttaccttcatttctccatctattctaggggagatgattgataagaatttccatctccctctctccctggaaaggctcagggatttaactagggaagatttagaaagtactttgtgtttcccccatggaaaagtactgtaataaagcatttattatatgtactgagttgtgcatgctgccataccaaagcaagttaagcataactacaatgggtcccagttgttatctgctattgtttaaaagtgaaaacaataaaaagtaagactggctcaggcctcagacttgcctgccagggacagtacctagaaggagaaggccagcacccaagtcagggatgcggcacagcctgcaggtgtcaggagtctgaggtcagactgcctggctgcggctcccagggacacttaccaattgggtatgcttgagccagttatgccactgctctgaatcttattttcctcttctacaaaatgcaaatatcaacagtccctaaacacacagggactgttatgaggaataaacaaggtggcccatgaaaaaacccttagcccagcctggcacataagaagcaatatggcgtggtggcttagaggagacactgggacttgtttatctgggttccactctgagatctgctaattcctagatgtatgtcctggggcaagttgcttaccttctctgtgcttcagtttcctcctctgaaaaatagtagtatatacataggatggttctgagaaccgaagttattacgtgagcaaaattcagtacatagtaagcactcagtaagtgttggctattttttttctttgggttctagttcagccttccccctctcttcttcattctcaattattaaccagtttaggtctagagtattcttgcctttgctttgagtctcataaaaacaatgccattgagcctttctcattttccaatgcacttgggtttacagtgtcctggaacccttttccagccattacttgtgtatatcttgtctgagccatagtccttctttccttatgatcacataaggaatattgtgtgtatatatatatatatatatatatatatatatacacacacacacacacacacacacacacacacacacacaatgctcattgccttctcattagtattctaggattttctgtgtgtgaaaaatcttttttaagaatctactaaatacttcttcagttctttatccatagggaaggggaagtgatccacgaatacttattgtatacctaataaaatattaatattggtagccagcattttttagcacttgcctcataccagatattgtactaaatgttttaaatacattattttattttatccttacaattgtcctatgtgggaggtatttgtggtttatcgatgaagaagcagactaggagagagtctgcacaatgcttatagtgccatggcttataggtggaggtgccagaatttgaatccaggacacctgactttacagcccatgctgttaacaatttcattctatttcttttctatgtgctgggcattttgtagataatctgggaagttcaaagaaatgaaaatccagtctctgacctaaagttcttatacagtatatagaatgagaatatctgtcataggataaagttggtcaagcacttatgtctcatgctgaatgaataaaataggtaacaaaaacctgccacaccagccactgaagattggagtggggagaaaacttacagtgtaaggagttcaggtggtctttggaagttatttattttatttttattgtttccagaagttattggggtattggggtacaggtggtgtttggttgcatgagtaagttctttagtggtgatctgtgagattttggtgcatccttcacccaagcagtatacactgccccatatttgtagtcttttatccctcgtctccctcccactcttaacccctaagtccctgaagtctgttgtatcattcttatgcctttgcatctccatagcatagctcccacataccagtgagaacatatgatgtttggttttccattcctgagttacatcacttagaataatagtctccagtctcatccaggtcactgcaaatgctgttaattaattcctttgtatggctgtgtagtattcactcacatatatatgtgtgtgtgtgtgtgtgtgtgtgtgtgtgatgtgatatatatatgtgtgtgtgtatatatatatatatctcacagtttctttatcctctcattgattaatgggcatttgggttagttccatggttttgcaattgtgaattgtgctgctataaacattcgtgtgcaagtatctttttcgaataatgacttcttttcctctgggtagataaccagtggtgggattgctggataaaatggtagatctacttttagttctttgaggaatctccacactgttttccatagtggctgtagtagtttacattgccgccagcagtgtagaggtgttctctgttcaccgcatccatgccaacatctactgtttcttgatattttgattatggccgttcttgcaggaataaggtggtatcacattgtgttttgatttgcattttcctgatacttagtgatgttatatacaaatggccaacaaacatatggaagtcatttttagcacaaaacttgcctcccatggccatgatcaacaaagtgctatgggtacatggctaaagaatcaggagcccatctggtgatagctttggctgtggatgatttaaacttcagtcttttcctgattgaggacttctcattccatgtctctaatggtgatattcttagtcatcttttctggcaaaataagtggttgtttctaaaattaacttcccaagtgttagtttaactaatgaagggagtgtttcccagtttcactgttctctagctgtagatctctggagtatattccatgtgccagtgtgttcacatgcagaactagggcgttgtttaatgtagagagacttcaggtgctacccatgatatagtcatggctgcaagcaataatgggaaggagagcaagatggtcagagattgggccacaatttagacctgcccctttatcaaatgcagctatgaggaatgcggtggacaccatcctatggcatcaaaggccggattgcctcattcctttatggaaggtgcttgaatttctcttctctccaaagccatttaaggaatctggggcaatcctgccgtttctgaccataattttcccatatcagtacccctaagaaagaaacaatgctaataaattatgttcacctttaacataactctacaccagggaaaaagaagaagccaactttgctgttattgttgccttttgcttttaaaaatgtgtgactagaaaagtagggaaacaaaaagaggcatgaagttttcttagcaataaaagcacacttttttggggagtcatgcataggggagagttgggccttcaacagagagatgtctttggacacctaccatagtttgtcagttgcagatgctaatggaaccaggcctggtgactgaaggggaaaatggaatatgaaagcaaaatgaaagaagcctatgaagcaagcatgtcatttccaaatgaaggtttcatgcaaaggaattgagtcttttcacagctgaaaatggaatctttaaataagataaaataaaaggatgccgtggcttgttgcgagttctgtaatgaaatacagttttcctaataccgtgtgacctgcatttctccctgctttatgggtgctattccttgacgtacaaacccgtattttctcaagtcagcatttgatgatggatgtcaaaatacaggccatgtattatgcatatagcattaccgatttaaggtgtttacttgtcaagttgaagaaattcaaaaacgtcacatccactgaatctgcacagctgtcacttccagtttttcatgtttttgaatgaaacttctaatgaaaacagtttagttttccccttcaccatcctagaagaagaaaacagctagcatttaaaaatgcgtgtttttggttatgtggttggctgaaaaacatatattcgaaagtttgaaaagatggacactacaatgtcaatcaaaatgacttacccttttcatagtgtattaatgtaaagaatcaatttaagtgcagtcagggaatggatattaagtaaaactttgtctttctttttgaaagtatggcactcagtgataagaaatgtatacacgggagagcagaaagtaagaaaacccttttatatttctctggcattttatgcattatgcacctccaaaacaacaggcaattattgagctcccgtatttcattcctgactcacacctagccaaaatgccagactcaacacaatcttgtcacattgctggaaagtgagtcagatatctggtcacataataatctatttggagttttatccttggaaatttagcaagtgactttgttcctaaaagtccctaattcattggtaagcccatgtagcattccgctgaaggaaaaaaggagaaaccgaagtgagtgtgaatgcttgcctatcatctaaatgtaattgcactgggtcttgccacttgcgtggagctgccgtatgcttcgttagaaaaattaatttttaccagatgaatgtaggaagtaaataggtttctaatattgatatgtgtccatgcaaaaccttaacgaggcagacattctgcctagccgggatatttctcactctcactaaactgaaagttacagttgttccaacctcatccaggtatgtacttggcttggacctgggacccaaagaagcccaaactgcaaaatcagagaccaagcaggctgctttccaattttcctgtgtccacatataccttatgtggtctgtgtttggcacactgggaagttcaagggatcagccataagcaggtggcatatacattagtcaggaggatttagatgcaagtaaactccttctccatttagcttaaacagaaagaaaaaaatgtgaacatcttattatattgtgtgtatgtatatgtataaatacatttgtgtatgtgtgtgtgtgtgtgtgtgtgtgtgtgtttatgtgtataaaatctcacatagggagaaatcctgaggtgggatggctccaggctgcttgccccaggaactccaggacagctcttcctgtcattcacttgagccaatatcactaagttagttatgccctcagctggtgcctcagttcctggcactacaggcacataaaaccgtgctcagtaaattaaaagagaatctcttcctatgtgtttctttttaagagcaaggaaacacttcctgaaagccccaggaagatttcctgacacctcccattggccagaactctgtgaaaactgaggcctaagtcactcaccagcaagaggataagcaattgattggtttacggtaacagtcaggccaggttaggttatgttgtggtaacaacaacaacaaacaaacaaacaaacaaatctcagcggcttaaagcaacacagctttattcttgactcactcagtatgctttgtgggtctgggtaactgtccagggctgttgtctagccttcatctccatagtaacctgtattctcacagttgccatggcctgggaagagagagatggctgtccaatacctgaaccagcagtgatatgcactgctctgctcacttttcatgggccagagcatttcatgtgtcacatggccatacctaacttcaagggggcacaggggataattctcctgtgtccctggaaagagatgggagccaagatctatgagcagaataaataattggtatgaagtctggattttttagggaactatgaagtgagttacgattatttataatggtttcctaccctgtccttctaaagaattaatcatcagagtttatcccgggaatactaattgttgacctgtgaataatgcataagctacatttttggggttgtatgtatatagtgtactctgattatttccaaattttctacttctctgatttttcttcctcctctgtttccttcccactagggttcacacctccaggaatggatagatcctctccagataacagcccagtgcacgggatgttacgtcaaccatccatcacaactggggtcaacatccccatcatcactgaactaggtaggggtcaatgtcagctttggggggagtttttgttctgtctttcaaaccatacaggatatgaggaggttggtttatttcttagccctttcaactttgtagctgctatggggtttgttttgagggggctgggaggaaggtatggggagaaatatggcagattaccggaagggaaaactgatctatctttcttctgagatgaatagacagtttccttcatgctggtcactgttttcaaaggagcatgagatgatggatttgcgattggggcattcaattgggaatggagaggaaaggaggaaaggcttagttcacggattctttctggtgatttttactgtaagaacctcttttgagcattctgtctggacagctcctacaatctgagtcctccactgatatacaaagcctcggatctaagccaaacccattttgggaacaaggtagaagccctgggctaatgtgtaataacttgacatttaacgtatcgtagttgaatatctcagccaaaagccattttcagcaaatgccattctggcccccaaaatgatggggttttgagggccatgttggttggacaatagaatctaacttctaacctggccatggcactccctgttaccattagtgagtgtgcaaaactgtagagtggcctcttcccccaagacaaatgcaaactacctgtggtccggggtccctttacttgagaatgtttcctctgttattccctcactctcttctttttctgtactttcctccactccctttccccaacccttaaatgctgtatccaattagctaaaccgggcaagttgcctttggtatcagtcaatcaggaaaaaaacagtgggacgcacattctaatgataactgaactgggtaagaagcactgttttccttcacatcagtatctccttttgttctgttgttggtgtttccaactatcatcagcttgtttttatttcaccggctgtaacagaaaggctaccccatggcactgctttgaatgtgttttatttgtggctctggttggaatcgactgtcttgttctggcctttcttaatgattttttccccacacagcatcagtaaacctttgatcacacccatctgacctggcagttgtttccaaagcatatttgctctaattcattttctctggcctgagccttttttccccacttttttttgtcaccccgctctcccgccttctcccttctactcctcttccaacatactgtcagtttgaatgacatgtcttcacagctcttagaggaagtcaaaggagaatatcaaaattttaagataagaaacctaagatggcactttccctccagctgtttatttttctttattctgactttatttgccttttttttttttcccccctactagggcatttctcagaagctctggttctgaagccataaaaacacctggtccctaggagaactttttttactaaaggcagatttcaagaagggtgcggaggataaggttagcagccacccacgtgcagccctgcactctggcccccaatcccagcccagaatcctctctgggagattcacaatggactcaggtggacgataaaggcctccagtcgtgactgcatttgttaggttcttccccacttccccgtgacttggttaataactccatgaagggcacccatcagcagcaagtctcagaactggggattgatcttctaaatagagacagcaaaagtgctgctcagcagaggggtggatagagaggtgggagcacctgccttcacatgactcacaaatgaaatgaacaccccattttcttggcccaaaaatatatttcaaaataagggagcaggctttcaacacagtaatcttgcttgcgagatgtctagaaaccaaggaataaattgtccaccactcagcagtgcattattgtaggtatagctatttatcaggacaaattcactcaggtcagggagtatcacactattttctgtttccaaccataggaggggtatctttttcatgtttagtgtagttgtttaaaagccctaggtttctggattgctctcctcagaactggagggcaataagagacccagggctcatgtggtccacgcctctggttggaaaattaatccaaacatctccatctcacaaacctacagcagcatttcagaatcctcactgccgggaatttcattttctatttggaattcacgtgccgctgactaactaggatatcttaatttgtcattagtagacgagaaaaggaaaagcttggtgccccaaacctaaggcaacaattctggtatttgattagcatcattgactctcctgaagcctttgtcccacaccagatttcttccttgtgttcagagaatctttcaggtgctcacaccacccttgtcttctgccttgaaacctatttctctagccactataccaccctcctcagaccatttcacctcccacatcccccacaaatacttcttatttatctacatgttctgagatgtgttctgcattatgccaggccagtataatgaattttaagagacacagagggcaccaaggccacacaagctttcaaagctgtgtagcacattccacttttcatctacttggagactctcaattgatgttagcatggcaaaggctcctcagagtctcacaagaaaggactgtgttacagctgtttcacctgactattccaattgtatttgaccacatatgctttggggtgattacgtgggtacctcttagcacccacataattactgttctgtgaaataggccttgagtagcattgcttgctctccttctgagactgggtatttcagaacggtatacaaggtattcactggaccctggctggtctcttggagcgcttttcctatgaccccagatgtctagctcactggcaatcgggagtcccctccccctacttggagtcacttcacctccatatctggtaccaacccttccccatcttcctgataagaggtaacagatgctgtgcttttcggagcattgccacacacaccattggtggctattacaagtaactaaaactgcattcttccatatgtggtctccagtttacattttctgattcacaaaacagaaagactaaacagtggcctacaacatccctttggacaagtgaagggaggtgaggaaaagctacctcttgaaagacccctgagcaagaccttcagtgtttccaagagaggcagagggaagctgggtattttcatgctataatgggtggacaggtatttaatgtcagaagggagatcatgacagcagctggtatttatcaagtcatggcatgatccagatgctgggccaggcttactgggcaccatcccattcgtatgagcctcctgacagcctcatgagagagctgctgtaactcccccattttacagaaacaaactaaggtatagaatgatgaaatgctttgcccaaggaagttggcagcacaggctggactgaagcccagttgtcagagcctggattttggactttcaccactagcctgcaattcaattgctgcttaaacaatggggacccaaatgtgaccaattttggaagaacagagcaaagattttccccattagaatttttctctggggaaacaagatgatgtcattttaaaatactaattccatgcctagcctttcatgctagtatcatttattctgcttcatacagtaaacaaaagttttttttttttaaaaaagaagagttatcaagaaagttgcttaaaaattaaaacaatcactctagaaaaaagaattagctgttgatacatttagaaaggaatcagggaaaggaaacctcatctgttctcttcctaaaatcacaataattatttcagaaattttgagtgcccccttctcccatccccccaccgacttttcccctattacttgctctgcaaaactgataatttccaaagccaagatgggaatggaaattaatttgtcatttaatttttaataagttaaagacatctgagtgacacaactaatcagcctgcacgtacatgcgggaggagtccttgaggaatcctcagatggaaatgaaatacagcatccaatgctgcatctgcttgaatgcaagcatataaaagattgagctgtttaggatgggaaagggagaacgtgggcgtccccatgcaactcaaaattcagagcaagtccttgtcagcaagcagcaggagacagccaggcatccatcccacctggggtttcctgtgtattaaacagggcctattgggtgtggacctagatttagggcctgggaccccgggaactacccaggccaatcccagtgggtaggctgcgggttatgcctgtggctgaattccttgctatctgcctttgctgtgctccccttccagcgctctttactcccaataagctgctttcttttcattgtggctaaaatgactatcccagcatggctgctcatcattgaaatatgtccatctctcaaaggacttggttaccaaaaaacactggaaagtgtttttaggtcatgatcctaaagctatgccaaaggactggccagcacagtctattggtcctccagtggcctgccgtggagcaagcctgcttgaacttattgctctccaggtctcagacacttaaacagtgacacaggaacagtccattgagtcccactgccccccttacccaaagatccatctacagcttattccatgcttttgtttccttctcaatgacttcagtatttctaaaccagtagcctggtctccctctggcttcaatgcctgtgtgtggtcttcagagctaattcttattttatgctttttctagtgaacgatactaatgttcagtttttggaccaagacgatgatgatgaccctgatacagaactgtacctcacgcagccctttgcctgtgggacagcatttgccgtcagtgtcctggactcactcatgagcgcggtgagttatcctgttccctcctcctcactcaagggtggaggatgtgccaatagagcacctccaacctttgaggccctgggctgcactggggccacagtggagagcaagactcctagaagctcacaccttagaaggggagacccacattataaaaccatcacacaagtaaatgtttgattataaattcctcaagtgcaaggaaggcaaggcaggctagaaggaaatataggtgagggcttgacctggttttggggatcccagaaaaattccccaagggagttgtacattttatgctaaaatttgagccataaagaggggagatcttgggggaagagcattctctgaagaagaaagaaagcaaatgcaaaacctggtgttgggggggacctgaggctctcaaagaaggcaaagaaaccctgtgaggctggaccatggggagacaagggtgcaggaggatggccaaggttagacctgcagaaccttgaaacacattttcatggttttggactttttcttaagaataatgaagaggcactgaaggattttagttggagagtgacataatcaggttcatgctttaaggggattgccttggctgttgtagggaggatgattcagaggtacaagatggcggcaggaggtctgagtaagaggctgtcatggcttggactaggatagagctggtgttgggatcgagggaggtggatggagctcagtggtattgggcagtacaattaataggacttgggaaaagattgagcatgagcagaaggtggagaggacagtgggtcaaagatgactgccaggcctgtcactgagactgaagtccttgggagagaaccaggcatggaggcaaggcctggctggaaggagggaggagttagtggcagagagaggacagtgggctggcccagggatcaaacacagctttggtttcttttataacttgatgtgcatctagcaatcaggcatttgttttttcacttttgcaaccgaaaaacaaataacgattaaaaaatgggtcccaacattatggagccatctttcactgcaaaaggcaaaagtaggcatttagaatgagtcataacctgggtattatgaagtcttcccactgagcatctttatttattatgtagaaaatcttcttcattttggagttctcaaattctcaatttgtgaaaatgcagacataggctgaacaaaaacttgacctttggagaatccatgataaagagcttttctgaacacattaaaaccataaacagaactcagagtttttacacacgtatatttcttaaagtgctgaaagttattctcctgaatgtgctaaacaactgatatgctaattatgtactggtctcatctattcattaaataatgctaatcccagaaggacctctatttgaggaaagaaaaaacataaagctttttaagactaatttgggttattctgtatgcctgaacattgtccaactgcaagcatatcttatttaaaaatcagaattttggatttaaaaatgactgtgaaatgacattcgtctgaattaaggttaactgggcttcatgccatgccatggctttccaagccaacaaggagataaaatggtccttggaaaagggctcccttggtttcctggggctcatgatctttcttatggcctgatgataccaaggctaacctttctacctgctagtgatgttgggctcagtttgggcaaactccttgagcaagccagaaggaatgatagaagcctcaagatgtgttcctaagaagaccatattctcagtcataggcctcatattctgcaaatccagtttcaaatggattttggtaattcatctcattagaaatttttattttagttctgatcctaattacagagatctcagaagactgttctaagagctggttaaactatttacagtagaatttttttttcagaactacaaaatactctgataacatttttaaaattccaaatttataaaattgtttatgtttctacatatcagatatttagtatgtttctagcaggactggctacataatttgcaaggtcacttttcatgaattattaagaatttcaaaatggtgacagcagagtattaaaacaaaagagacttggggctgggtgcggtggctaccgcttgtaacccagcactttagaaggccgaggtgggcagatcacttgagcccaggagtttgagaccagcctgggcaacatggcaaaaccctgtctctactaaaaatataaaaaaattagctgggtgtggtggtgtgcacctgtaatcccagctacttgggaggctgaggcctgagaatcgcttgagcctgggaggtggaggttgctgtgagatgatatagcgccactgcactccagcctgggtgacagaatgagaccctgtctcaaaaaataaaataaaataaaataaaacaacagagatgtgtctgagtacagccctgtgcaaccacataggctgaacacccatgaaaccagccctggttccaaggaataaaatcggtttgagcactggagaacttcttttcaacacagccaaaggggcatatggtagccacagggtggaggtgggggcccatctggatttgagttgcacaagcatctatatcatcagtaggtagtcagttcttggaaattcaaatgagaattcaaagtgaattgatttgaaatttttaaacaagccatctctcatctcctttgaaatgcacacaaaaatgtttgggatagtgtgactaaggcatgtttggatgcaatagtatgggagcagcatgtcttctgcattctagcctaggataaaagggtatcaggaatctggtaactgtcattgtatttatcatcaggagcatcatttactaagggcccagaactgtgcgaggcactttagctacactatcgaatcttttggacaataatgtgaatactcttggtttaagtgttgaagcaagacatatttaagtaagtcattgatggtaacttttcaaatcattaatcaaaatgcctatcaaattattccaggtcttgttttcattgtctaggatgaacaagcttcataatgaggtcttgagtagggtctgagtccacaaatctagttggatccagacgttttggtaaaatgttacctgtgatttctttgcattctaccccaaccttaatgtatgaaaaaacagattagtcaagtgccaaggcagtaactagaaggaacaaaaagggctgtcatgaatataaattgagaaagtgagactcctccaaacagcaggagacagaggtaaactttcattgcaggcattcactcataagcaacatcacaacatccacacacaaatctcttcagctgttgacagtctccttattctagcgctcctccccaaattgtcatttaatcatgtgtctaaacattctctgaatattgtccttcataacccaactcctgctgcttactgcttcatttgttaaaagaataatattttgattcatcacaggcattcctggaacagatcaggatgttacagacatggccctgtggctttatctcacaaatcaacagcagaaacacaggatgagagggaataattaggtttttggatatatgtctctaagaagatcacaacttagaaatgtatttttcagaatgataccatcttgatgcacacagtcgcaccaggtgaaaggaatcctctctgtttttagggatgagactcacatatgagtattcagatttctttttcatccagctatcactttctcccaaccccagccccaacttaagctccacttggaccctgaaaagtgaatactggacatggactcaagcgccagatggcttagatctggattccagaactgctgtttactggctgggtaaccttaacctccctgtgcctcagttttctcatctttaaaatgaagatagtaatagtacctatgtcacagggttgcagagatgagtaaatgggtaaaggttgtaaagcgattagagcggtgcttagcacttgacaagctctgtatgtatttattgttgctagtgtttttaatcaatacatttattgggcacttactggacaccaggcatgattccccatgctgcggattcagttgtaaaaaagaaggatgaagaccttgccttcatgttatttaaactttcattctagtgggttaagagtaaataggtaagtgaataaatgaatagtgtcacataaggataattgatttgaagaacatgaaatagcttgaatgggtgtggagacctgttttaccctcagtggtcagagtaaaattatcctaggaggtaacattgaagctgacactgaaaaaaacagagggagagaacactataaaggccaaagctgcacagtggtgacaagctgggtttggtttgttggaggaagcagttggaggccattatggttggaatgtggtagacaggaaggcaatcaagaaggcaaggccgctggccacactgagtattccgagtacaatagaccacatctggccaagttctaagtctggaatgagacacttcagacttggcgagaggatcctccttcttctgaaagccaccagcttcctcctaatgccactgtttctggatacgctggctaggacagtgagctcatcactgagttgattcctgaagcgcaacccttgattatttttttgtccaacaccccatcctcatgcactcattttagaagaagaaatagcacaatatattggcatagtacttggcttgatatcttgtttctaataaaagatctgtaatagaagtctcgaaatgtcacattgcagtctacatctaccccacagacaacttctgcatttatcaagtttttatttttaaattgaatttgttgccaatattttaaaataagattttatataaaatcggggttcctgccttctttaaattagagtcagaaggcagagtcccagattcccgtaaagcagctattggcttgagctgagcagctgctccctttagccacagtccacactactctctattgtatcccaccaggcctgcttcattcatgtcccttccctgcttggttcatcccactgtcctggccttaccagcctcctgcgttttgcttctaatcttatgtgtctgcattgcaatgtctgtggtcagacagcatccttggccttccggtcacttgcttgtcctctgagttaggaggttgtgcacatgatgtccattttccttgagccttggacctttcctaaacagataccaatcacactgaaccatcgttattgaaggagcagtgaggagccacctccttctgaggagaaaaaggggaaccctactacaagagctaatgagttccaatgcacacaagttgggagtgttgtcgttttttttttagaaaacaagatttaatgaagctttaggtttgcagggcctacctaatctggaaaaataaagaaaaagcatattataacagtgttaagagaaagagcagagaaaagcagaggccccttttgctagtgtacgatacatctgagaagcgtgaatgccagcctatggagagacccatgcgcaggatcccccaggagctagagagaaatttcaatgtgagccagttaaggcaggtgtgtctttgctctgcccactgcaccacaatgcccagggcaggagtttgcatgtccagtgcattcatattttcagaacaaaggcagtgacttggaggagggaaactgggccatgaattaggacttgtagcttctggtcctggctcaccggcagcccttgcacattttttctactgttaaatgggaatgatgttactccttatgactttctgctaattggagaatggcaaaggcatataaaaatctttcacagagcagatacgtatttcttaagatcacatgtaattacaaagaagcagatttttttggtatatatgcatgtacatatatgtatatatatttatgtgtttgtgtgcacttatcctctctctttctctctttcatgaacacacatcttagataatatttgggagcttagtgggtagatgagttggggtacccagaagatatgattccatgttctcatctttaatatcagagagctggcctgtttgccagaaacgaagttatatcagtaagactggagggtgtgaccgtctggaatgtgggttcacatgatttactgtctttcctgtactttcattaagggccaaacccttgaacctggtgttatggagaggcctgagttctctatcagtccaagctaacctaatgccatgtgattttagttacataaacaatttattgctccataaccctatttcttacactccactcaagagcctccatttcaactgctcacacggagacagagggcacatggccgtcccgaggcagaggagctagcagtggtgtcagtcgggtacatggaggtatgtcctgctagactcaggacagaccactgctgtcacatcaggccaggcaggcctggggtagggaaaaaaaaatccaatcattttcatccctcacgaaagaaaaatactaaaaataaaaatctacaccatgaaaactagcaaatataaaaaatggcagctatgacatggaaaatgacaattttagagcaattataaacgaaaggcagagagccattaaagttaaggcaatgttattaaaagatgtgttaattttcagttaaattttctataaaagaccaattagtttaaaaggcttgacagcattaactgtgaaacataagctccggtaattatactttaaaaaaataaaaagaggaggatgcttgggcgggttacacttgcaggcacagcggggcgtgggccaagcgggctagatggcgctgtgggctcaggtttccctgttacagtgccttggtccctcccctggcatttcatggtttcctcagtgtccttttacaggacctgagaatcatcaaactttagaggccaagcgggccacccttgtgttctgagccagctctcagagattagaatcagaacgccgagacacccggagagggaattgtctaaattggttgcattgctagttgatggttctttttataaactcccattttttgagtatgctttgtctatcagaagtttcacaaatcctctcatttaactctaatctataaatttttgttttgttttgttttttcatctctgttatatggatgaggaattcaaggcagagaaaagttaggcaactttttcattgttgtgcctattggatagcaaagcaggtattaaaagccacactaattggatttggaaatctgtactcataaccagggggccacgttgccttaatcagaagaagggcttcgctagtcaggtttgcaaacttgtccttggcagtgggaagagggactcctgtattccttagactatgcgggttccctgatcccaggctctgaacaggaccctaactcagctgtcttatactcaatgcccatgtgacgcaaggatagatattgagaaggtctctgcctgaagcatccctgaagactaaccctgccagagttggaggttctatacaagagcttcccagaagacttctagcacaggtatcatggtaaggcacagaaaagactggcaggacaaaagcttaggaggcaaaggatctcacctacatgatcctgcctttagaatgtttcatttcttcaattttagcatttatgttaacccagaaaaaaatgtgtgccttctgggtcaggtgagttgtagagaggtttcctccgcaggaagcgcctttggtaattggcatttgaagttctagcacctggtttgccccatgatgcagaaacagccatcacctatgcagaaagccttggagtgatgcttaattgcagactgctgaatgctccgtgaagtgccctaccccaaccctcactcccatcacataaggaaatttgcatcctccaatatgactgacctgacacccttttccagaaaaggcattgtctttccaccaaattattcagatcctgaagagataggtgtgcagagcacacccgtcagcaatgctcagagtccttttctgcatccgaatattggggtatcaaaacaggagcaaaagcatctgctggcaaaaatacatcatcattctctgtcatcacagattctgctgccccacagctctgctcctggatgcctgcatggaaaaatcaaggagagccatcatctgggatgcagtgccagctcagagagcagacaattatgctcagagatatgagtggtcccagagttgttcagacacctgtgaaaccctgggactgactatgaaattgtacctgttgatgagcaattctaaaagtcatgcactctttgactttcacacaatttcaggctaaaccaaggcccaacgattagtaggtgctcaataaatgtcagtgactgatcaaaaagatttgggtataactgatttcaacacagaagtgggaacatgttagggtcaaatcccaaagatttgacaaaacaataacctcccagcctgaccttctagatttatcattgcaatggataacctatagtgccctttgtttaaaaaaaattgactgtgtttttattagaacagttattcatacttcttgatgaaaatttggaaagcacagaaacatataaaagaagacatataaagaagaaacatataaaaataaaaagaaaacatataaagaagaaaatataaatggcctatgtttccaacaccaaggataagcatggttaatattttggtgtctttccttctaaatggatggataaatacagaattatctcattttataggttggttattttttcccttttcagttaatattttatccagagtattttattatttccttaggtgtcatgatttgcagagcctccataggactttatgagactccagtctgtggatgttccagaatcgatttatcactaaatttttggctatttagctttaaaaaatttttgttatagcaatgattaatcctgtaataaaaattattgtacataaatctttgaacaagtagcaacttattatattgaggcaaatgtactgggttttttttttttttaacaaatagggacattttaaaatttcttgatacatattgtcatgatatctccaagaaacaattttaccaatccacactctcgtcatactgagccatctcatacattatggcaaatgccgattgtcatttttcctaggaggccctttaattgtgtttatgatagttttgaagcatatcagtttttaatctgtatataatgatgtaaatacatattttatatagtgaattcagtttttatgcataaaaagtgcatgctgaacatgagaactatcaagcatcttgagattaaacagtttgctatatttttgtgaagttgtttgtggctacattttttgcctttaactatttagtaacatttactttcttttttacagaaatttaaaataaatgtattttcacagcagaaaatatataaaataaaattataggaaaaaaaccccaaattctaaaaccaagaattaactactaagtagaaattttgtgtactacttacagttactttcacataaatacgtctatcagttcaggtatgcattatttttccctctggaagtccccaaatcagagcattatgtactttttgtaatactttatggtagaaataaatgagtgaccataataataaacaggatatcattttctgataactttccattaaacattgaagatttatatttaaaaaataattcaaaaagtaataagtgcatgatttgttatattatgaaacagtgtacattataaagtttaataataaaaatgatctctacattttataaacatatgataattgaaaacattaaaaggaatcattagtatgaaaaagccaattaaaagtaatattaaaacttaaaacccagtaccataaagattcaatatttaaaagtgggtactcttaaaattaaattttaaatacagaaaaagttaatttccctagccaatagttttgcaggtatgcatttttaacatgaattgtgattcatggtgttttggggatcctacttttaaaaaacattttagtattatataattattaccatgccattaaatattatctgaaagcacaatattcatgtctgtacaatatgagtcatgtcaaagaaccattgtttaatcattaccatattgttgaaaaatttttatcagagagccagtttcccccaaatcattcattgagtaaaatcccttccctgtggtatgcaatgctttccttgttatactaaggaatggatcagcaaactgtcttgtaaagagccagatggtaaatattttcagcctttgagggccacatagtctctgtcacaactacttaactctgagtttgttagcaccaaagcagccccagacaatacataaacaaatggacatggctgggtcccaacaaaaccttattttaaaaaagtaatggatggcagagcaagatttggcccaagagccagatttgccaacttttgtattaaggtcttataactactaagctatggttctcataaatccattctggttgatcttctaatttttcacattgtctacaatatttggttaggaaacctttaaaatttactatactacatgagaggacaattttgtacaactctttccaggggaaatttagcataattttatcaagttttaaaaagtccaattcaaatctgcaattacacatatgtcaaacaacaattttactggaaaaaatgacattaaatggcctatttacatgttaaggaacatggaattttccttttttcctaatactctcctctgtctcttcatagatgattactactttgctttttgcctaaaaacagtagcgattcttattcacgtccagtgattggtattaaagagagtatctggaataatactgttaattctcctatgtatctgacattttattctccttatttctaattttatttgtgttttttcagttatattgtcataagtttattttttcaaggaattatttcttgaatttaacaattcactaaatatcctcttgctaattcattaactgacacttttcatcctgcttttttttaaaaaaagaattcttttaatacttaattttacttattataattctgttgtatttaataatagcattaaaggctctgaatttgtctctatagcattggcctcaagacatgatatttttatatgtcattctcaaatattctttaattttaaaatatttcatattctaagtttgatttccatcttgacctagtagttataggatacttaacaaaatttttttgatgttctggaatatttacttttgcctctattacattgtatttaatttttaaaatgtaggttatacagcttatactttgttatatgtattgagatttgatggttttggccattgatttttttttttgtaatcgttgttacaaagtttagtaaaaatacactaaatcaacctgattatatcctcaattttcttatcttttgatctatttggcctgtaaaagctaaaaacagtgatagtgggaatatttcacgtattacccttagtccagatttattctagtgtaattctaattagttttgctttctatatttcagttataatatttgtccataaaaaattatagctttattgtgtcaactatgaatataaaattaacttatctaacataatagtttaaaatttttctttgaagctatactttttttcttccctttttctcttttaaagatatcagagtttgattttggcatttgaacaagtctgaaaatctttgccattttataggatcatttagctcatttatgtttagttatataacataagatgctatagtcttgcattatgttttttacatgcttctatcataattatatgttttatgatccatcttttggtatgtggactatattttgtatgcttattttctgtagtgtaaactttccattctatttttaactctagttagttgttaccagccattctatagatgtattttctaagtattattgtctagaaaaatttagtagttcttgattcctccttgtataagatcaggcaattttcatgcctttatttccatcatcatctctatctcatctcatttttctaactttaaaacataattttagcaatactatattaatagctagttttgtcatttttttaataattagttttgacatttgcattccattttgtaataatatatacaataatcttttacaattctgttttaaatatattttaacagtaaaccaaatttgctcatattttagttactaagggtttaaaattatctttaaagaagctaatttttgtttctaagtatttaaaaaaattaaatcaataaatgcttatgtacgcaaagagtcaaaaaatatttcagttgccttcacaaattattggcaatttaactatatgtagaatttttggaacaaatgtgtcctgtcaaaattcctttgacattcctcttacattttctagagaagcttcagcctagccttattttatacttgtatttcttacagcattgttttaggtcatttttattctccatttaatattttgaattcaaatattcaccgagtacaggtctaggagttggccacattaacttgctgaatgcttttgatctgcatcctagattcatttcccagctcaggacaggttatttttatttgtttgtttgcttgttttacacgcttgcattttgtttacaactttgatttgtaaatacttactgtttatcacttgacctttgttgtctttttctcaatatcaaccagcactcttattaaacaaacaaacaaaaatccctatatctttctctatttagcttagaacttcctggttttacttccgtatcactaattgtgtgtgtgtgtgtgtgtgtgtgtgtgtgtgtgtgtaattttcacctctaatactcatggctccttagattaaaaagttggccagtgcaaatttagttgtcttttaactatttattttaaaaaaatgagacacaacatactatacaactcatccatttaaagtgtacgattcagtggttttttttttagcatattcacagacatgtacagccatcactacagtcaattttagaacatgttcatggcatcaaaaagaaactttgtattttagttatcctaccctcccctacaactccacccatcaacccaccaaccctaagccaccactgatctactcattatttctgtagacatgccttttctggatattttatataaatagactcttgttgcaggaagtcagagaccccaaacggagggactggctgaagccttggcagaagaacataaattatgaagatttcatggacatttatcacttccccaatcagtactcttaataatttcctatgtctgtctttaatctcttaatcccatcatctttgtaagctgaggatgtatgtcgcctcaggaccctgtgatgattccgttaactgcacaaattttttctaaagcatgtgtgtttgaacaatatgaaatctgggcaccttaagaacaggataacagcaattttcagggaacaagggagataaccttaaagtctggctgcctgtgggctgggtggaacagagccatgtttctcttattactgaaaacaggtaagagaaatattgctgaattctttccccagtaaggaatattaataattaacaaccctgggaaaagaatgcattcccaggaggagcctctaaaatggctgctctgggggtgtctgccttatggagttgcagataagggatgaaacactccctggcctcctgcagcgcccccaggcttgctaggattaggaaattccagcccggcaaattctagtcagaccggttctctgctcttgaaccctgttaagatgattatcaatgacaacgcctgcacagcaggacatggaagttccttaataattctagttttgccctgaccttgtgatctcgccctgaccttttgccttgtgaccttttgttgcccttgaagcatgtgatctctgtgacccacaccctattcatacactccctcccctttgaaaattgctaataaaaacttgctggttttgcggctcagggggcatcatggaacccgccgacatgtgatgtctcccccagacacccagctttaaaatttctcccttttgtactctttccctttatttctcagactggccgacacttaaggaaatagaaacgaatgtacattgaattatcagaggtggtttgtctgatagactctcagtacaatgtgttcaaggttcatccatgttgtagcatgtatcattgcatcactcttttttacggccaaataatactcattgcacggatataatacattttgtgcatgcattcattagctaatggaaatttgggttattttcaccttttgggtattaccaataatgctgctataaacatctgtgtacacgttttcatatggacatatatttttatttatcttgggtatatactgtaagagtggaatttctgggtcatatagcaacacaatgttcaaacatatgaggaactgcctagctgttttccaaagtgactgtgtagcaggacgagctgcagacaaaactcctcagacaccgagttaaagaaggaagaggtttattcggccagcggcattggcaagactcctgtctcaagagccgagtatcccaagtgagcaattcctgtcccttttaagggctcacaactctaagggggtgcgtgtgagagggttgtgatcgattgagcaagcagggggtacgtgactaggggcggcatgcaccggtaattagattggaacaaaaaaggatagggattttcacagtgcttttctatacaatgtctgtaatctatagataacataaccgattaagtgcgggtcagtctttaactaccaggcccagggtgtggcaccgggctatctgcttgtgggtttcatttctgccttttaatgtttactttttctttctttggaggcagaaattgggcataacacaatgtgaggggtggtctcctcccttaactgcaccactttacattcccaccagcagtgtgtgagagttccagtttctccttattcttaccaattcttgttattatcatcagtcttttttattacagctattctagtaggtgtaaaatatctcattgtggttttgatttgcatttctctgatgactagagctgttgagcctctttgcataagtttattaaccacttttatatctttttggagaaatgtttaagtcttctgcccgtttaaaaaattgggttgtcttttttggttgagttataaaaggctttttaatactgaatattagacccttatcagacatatgatttgcaaacatgctctctcattttgtaggttgtttttttcactttttggatagtgtccttcaaagaacaaatattttttaaatttttatgaagtccaatttaatctgttcttcttgtagtttatgctttttgtgtcatgtccaagaaactattgccaaatcaaaggtcataaagacttactcctatattttcttctaagcattttgcagttttagcttttacatttagatctttgaccccttttgtgttaatttttgcatatagtgtgaggtataggtcccactttattcttctgcctgtggatacccagttgttgctatgccatttgtttaaaagactatattaacttctccattgaatggtcttggcacactcactgaaaattaatagatcataactgaatgagtttatttctggattttcaattattttccattggtctataggtctatcctatgccattactatcttgattactatagtcttgtagtatgttttgaaactgggaagtatgaaacttccaacttcgtctttcttttataaggctataagattgctttggctattttgggtctgttgcagttttagagtcaatttttccatttttacaaaaaaatggactttgtgattttgataggtattacataaaatctggaaattaaggtagtattccatcttaataaatcaagtcttctaatccaggaacatgggatgtctgtccatttatttaggtcttctttaatttctttcagtaatattttgtagtttgcagtataccagtcttgttcctccttcaatatatttatttctaagtattttattcattatttttctgagacagaatctcactctgtcacccaggctggggtgcagtggcatgatctcagattactgcaacatctgccgcccgggttcaagtaattctctggcctcagcctcccgaggatctgggattacaggtgcccgccaccatgcctagctaatttttttatttttagtagagactaggattcaccacgttggccagcctggtcccaactcctgacctcactcctgacctcaaatgatcctcccaccttggcctaccaaagttctgggattacaggtgtgcaccatgcttggctgacctcccattttctaccacatcgagtttaaaatcccttgcttggtttttaaagccctgagttccccacgcctccaagaaaacaaagaagattaaaaattcaaaggaaagttgagaatggagctgactgttcctctacttggcaaaggcctcatgtctctgatatgaggccaaaatgtttatcagtgcttcctgtgcaccaagcatgtttctaagtgcttcatgggtaggtcatagagccccacagccttctattattacattttacagatcatgaaacggaggcacaaaaatgttaaataactttccaaggtcacacagcttctgagaggtgaagtcagcattaaacccctcagcccagctctggatccctggatcccataacctctccagaaacatatcctactttaagtatcctttttctgcttctgtgcctaagggcatatcttaactctgagcataaatttcctttagggtctggcaggctatggataacattcctaaattcttttgcagttggaattttgtatcacaatgggtgtttttgtaagtatttcaatgaggattgtgaatccagccccgctagtaactatcatcttaattcagaagtcctcatggaattatgtgaatataaatttggttttaatgaccactgttattttacagacgagaaaaatcaaagtccagaatgactaggcaacctccaagacatagaactagttagcaaacctgggatgggaacttgagctcacccttacttggtttgttccctactatgccttgccagctaaactctctaagaagctgctgaggtgcaattgcatctttccttacctctttccaaagtgcatcctcaaaagccacaggcaaactttgatttgagttttttagcctgcttgatttctacttacataggaaaatggaatgcacacccttacctgagaatttctcaaattaggctggtgacaaataccttttaaagctcctttatttgacatcctattaattttttttaaactcccattcttttgttcctgacagatctgttatgtttcagatgtgacacaaatgtacacttagagggaaacttctttaataagtgatatttgcctcagactactgaggttattttagaaaacaaaagccaaagtacacttaccaggacattcaccttttcataaatttatccggcatatttaattgatcgagatttctgagttagacagttatcaacgcatgtggtaaatcgttaagcgtgtggcattaatgaaaggttttgccgttgtcgtggggaggaagcttcctggcacatggatgacagggcctcagagacaatgctgcttgggttagtagctggggcaggctgcattttattacacgtgtccagaatctcatagtagtcacgtagactttaggagggggaggcaatatttgtatccctactaaaaccaattatggcaaacactaattattcagatttgagccctttactaaaaaatcccctgaactgggttttttaagtcaggctgtcgtagcagagccaagcaagagagaaaataacggaataattggaggctgctgtcttttcactccccacatgaaattatttgaagagacaggccagaactttaaacaggagataccaagaaaagttgtaatttggatgtcggctgtcatgactttagggtgtttgcttaaaggacttttccctcactttctctccttccccagacgtacttcaatgacaatatcctcaccctgatacggaccctggtgaccggaggagccacgccggagctggaggctctgattgctgaggaaaacgcccttagaggtggctacagcaccccgcagacactggccaatagggaccgctgccgcgtggcccagttagctctgctcgatgggccatttgcggacttaggggtgagtccacagcaccgaggtcacctgagcttgctgtttgggaaaagcttgatcctgaagaacgtggtatcagatgtgacaagctaggcatctggcttttctccttcctattgtagataactgtaagaggtgatatttatttatagtttactctggatcagacactttgctctatgcatagtcattcattttaatcttcatagcaaccctttgatataagttctagtatcacaccttctaagtcaactgaggcccagagagaatgagcactagacctattgggaatttgcaccaaggcatcctggcttcagagccagtgggctttctccctccttggtgttctcttcacgtatcctctgcacaaggtgagaagcagcaggtgatgccagcatgcagccaaggttgggaaatatttccacaggctcttagcgtagcttagggatactcaacccaactatacattaatagcacatggaggtggccagcctcagcctgcaggtttcttagtttttatatgtgaataggacccaggcactggtggttttcaaagcaccagggtagtcagtagtcagatgtatccagaaccaccggccaaacaaaccgaatcttatgtggatcctttaatgcctgtaaatcaaaacctagaccttgtaatttctgagagtggacccagtcacgttccctcatgtcctccctgtgacggaagtggccagcgtctcccttctgattccatgtatctgcctagtgtaggcactgtgacagaagtgtgctgtctttgcccttattcccagcccaaccccacagatgcatttaagagatgcagccataagtcacagaaactgataaacctgttacacaaacaatggtgtcgcccagaaagactaaatagtggaaaaggagccaaggaaagggtctgtctctgttttttctgaaacagtgctgcatactttccccatattttagtttgatcatggactgggacctatgttagactaggctttttttgaaagggaattttcatagctagtggctctttatacctatcatttacttattgatgcacttgattaggataaagactttagataatggtaagatttggtcccatcagtgttctttggtatgagaccaatatgagaattccaatgattggaaggacaaagacagtcattttatacccagtgaagccatcccgcagtgcccagtgcccttcatataatacaggtaacatctacctgaagccacctggccgctgaagccagcatttccaagtggatgcatttgctttcactttctgcatcaggccccagaccccgggaaggtggctgtgaactgatcagaactgcgaatcctagttattcagcctgcagacccctggctcctagggaaacacattctcttgcacccttgccatctctgaggtctgtaaattgtgcttttcacagggtccttacctcctgaaagagtctgtcaccataggacctggtggggtcctcctccttgcggtggttttcattatcactcagacagttttgacaacacgagcctatcacagcggttacagctgagctgggactgaacataatcaccattttgcagagaagggttcatctcctcagctgagcatacatctgagaccatcaagctttacactttgacttaaagtgagggagaagcataatctccttagagctttcaaaccccactgcgacaggtggaaaactggagagacaccagaggaaaaccccattgttacctgatccctaaaaatcacacatattgggtgtagtctgttaaacatgttgacttcttccactgccgtcccttggcacatggaccctccaacttgggagacaccaaaacaagctttgatgaaaagacccgtttccctgctgtcccttgattttcaggcaaataaaaaggatgtttctctctgttcttttgctgtctcccaggatggtggttgttatggtgatctgttctgcaaagctctgaaaacatataatatgctttgttttggaatttaccggctgagagatgctcacctcagcacccccagtcagtgcacaaagaggtgagtattggtttcaactctgccctcccacctaatcacagaaatattaatatcctttcctgtcccctactgtaaaggcaaaggtctgtatacatctcctcaacatgcaaattactctgcccatattaaatccaacactgagtttggaggtgatgggaagcatttttctataattactaatagtagatgtaaagacattttggtaagaattcaagttttgtattaatagaataattccatcacctaattacaaaagtctgaatacacaaacatctctcccaaactctagctactaggataacatctgttggtacctaatatagagatattttacattgctagtgtttaagataagtttttttgtttttttgttttttgtttgtttgttttttgagatggagtgttgctctgttgcccaggctggagtgcagtggcacaatcttggctcactgcaacctctgcctcctgggttccagtgattctcttgccttagcctcctgagtagctgggattataggcacacaccaccacacccagccaatttttgtgtttttagtagagagaaggcttgttggccaggctggtctcgaactcctgacctcaagtgatccacccacctcggcctcccaaagtgctgggcttacaggtgtgagccaccacaccccgccctaagataagtggttcttctgccatatctcagaatcccatatttttacttcacatattttaaattgactcgctttttaacttttatatatttatttttgagacaattatatattatcaccttaagcagagaaataacagtttagatgtgccaattatatttttctcatatgcattaaaataaattcatagcaggcaaaaattaaaagtacatcctagaattaccaagatcagtgagtttgcataatataccctaggcaacagtgctgcagagacaagcgtttctcatccctgcttgcatagtagaatcacctggggagcttttaaaaaatattctgattactctaacttaactggtctggaaggaagaaaacatcatatatatattttaaattatgtaaacattttatatataataaccagggattatagtgtatagccagaattgagaacaattgctatagaccagtgggttctcaaaatttagccatcatgagactcacctgcagagcttgttcaaccacagattgctggaccccatcctcagcacttccaattcagtaggtctgggtgggattgcttaagaacttgcatttcctagttcctaggtgatgctgacctgtgtggcctaaggaccacacttggtgaccactgctctaagtgaaacagcgtgattttcttagtcacatctgctgttgaccaaagaaagctccaactaattgtgaagaacaacaaagtagtgctgataagtaggcaggtttcttagattcttccatgtggtgaattccaaattccaaattctctcaccaaagtagattttaaaaggtaaagagcgagaatagtctaaggagacactctgtcatggtaaacaaagatcttgtgatgtatatctgggattgtccgaaaattatgaaatgaaagttgcatcacacttcatgaaacctcttgcggttgggctacttgaaagtgactttgaccttgtatagaaaggtacatgtagaccacgagaagcgaagtttggttcttccattactggctctaattccacatctctgcctgggctcctggctggcctcctttattgagttaaacagaggaagtttccatttaacaagaaaaagaatgtttaaggcctcagaccagctaggagtgcatcttccagatcctctgaaagtcctgagtaaccaggccattgcttttggttcagagagagttgaattctttactcagttactctcaggaggtgacatctctgctttccctgtccaggtatgtcatcaccaacccgccctatgagtttgagctcgtgccgacggacctgatcttctgcttaatgcagtttgaccacaatgccggccagtcccgggccagcctgtcccattcctcccactcgtcgcagtcctccagcaagaagagctcctctgttcactccatcccatccacagcaaaccgacagaaccggcccaagtccagggagtcccgggacaaacagaagtacgtgcaggaagagcggctttgatatgtgtatccaccgccactgtgtgaaactgtatctgccactcatttccccagttggtgtttccaacaaagtaactttccctgttttcccctgtagtccccccctttttttttacacatatttgcatatgtatgatagtgtgcatgtggttgtcatttttatttcaccaccataaaacccttgagcacaacagcaaataagcagacggaccaaaagttatttatgattctgggggaaaaataacccaaaggcatgctccagacataaatagctcactgcaggaacgagttcacagattagaagggagcacttgtgatcaacgtcagttaggcagagcaagtttatttaatgtaaaagaaaagttgattctgatttatcaggattatcagggtgctttgggttttgattttgttgttgttgttgttttcctttctttctttttttatacacacaataagttagcacatgtttatttgaaacaagcaaccaaacagcaatgaaaacatattgattgtttccagtctctgggccgaagtattgcgaagcatttgaaaagctttcacgatttgtgtagatgattatgaaggacctgcttgttgcaagagaacatcagtgatttttttagttactcaccaaggccttttgtcccagagccagttccctctgggagttcttatgaacatttctcaccttaatatggaggagagaatagtattccaatcatggatgtatcaaattctagtcatttagtttaagtgaaaagaggtttgattgcatattaaattgttattctgtctccttatgttgccatatgaatagctattttttttctttcacttttgacatttgggatgaaaagccatatgtatcataaatatcagatgtaagtcattaaaaactgccttcctgggacttttacatcttttaaaaggtgaattacttaccttatgtacagaataaataatgctcaggaaagagcaagtatttttccatgcattctcaggggatctttttactcccctttgtttgattagttagggccccaatgccaggtaggaggaagggctggggcaatggtagagtgagaggaagacaaacccagctgcagatcatgcttttctaggagccgacatgctaaataaattagaatgtaggaggatcagccacagttgactcaacaaagacaaaagccagccaccaccttcaactgttggcacagctgtgcggtgctggctgtcccaatgcagaaagctggtgggaaggaattcctcatcatcactttctttaatgtagccaatttaggcagggtaatgacggcaatagagagctgctccttgtcattatgagacgtgggataagaagagtgcaacagtgagccaaacacattttggtatagttatttttttcttcttttgttttctttcttttttaacacttagtaagcatgagaggagaggtagaaaaatacccttttttcaacatatagttgtcagatgctttgtgcatgcaaatcatgctttaggcagtgcggtatttcttaaaaactggccaattcaccataaccaatttcccttatggatggactaggctggtatatacatatttgaaaagttttacttcaaagaattccatcgaatagaataggggtaaaagggaggaggaaaacatgtcacagctgtaccatctctaaaaaggtgtttttatggtgaatgttttggatttagattttggatcccccgtcccctcaagcatgatagttttggatatttgcttgctgtgtgaattgacaagcacttttactgacaaatggtgaggctcagtcagaacctccaccctcccccacaccaaagacaggggcagcgtagtattcaaaccagtattgtggtggggaataattgtatacatgtaaattatcaagccctatgagtggaagaattttttcaaattatttttgtccctctatatattgatttatattatgtataactatctctttatataaactatatataattatatatatataactatataattatatatatataactatatatataactatatatatgtatcccctagtattggatcatgaagagctcttcatgcattctttgcaaaggaggttataaagttacgccctcagaacatttataactataagaatgtgccagttaaagtgctcaacaggaaatatgacagtttaaaagcattgtaaaactcacatagcttacttctctctctaaagtgcaacaaggatgaatagaatgggccaaggtatgacaattaatggttctgcatgacctagccactgctgggggttttcttctataacgttgtccttgtgaaaacttttgtgaaattaaaaaaaaaggagttacaaattttattctgttattggtttgtttatttttatttatattgttctgtttgtggttttatttattttgttttgcttttccccccctcccctttccctctccttttcccttccttcttctcttccttccttcttccactttctaaattgctcagcgcaatgaggctgtgctgctgctatcgctagattccttagagtttgttttggtgttcttgggtgtggggttgggtaatttggggggaacttctctccatctggcttgccttttaatctgcacgtggcctccctgcccaccctggtaccttgctccaagtccgaaagcattttcctatcaagaaacccagcttccttcacttcccccattgccaccccccaatcccagtccccccatcggtctgttcacatctctgtgttcatcttggcaagacctactcaatcaagtgatgatgccagttgataaacttccctggaaaacatttacagctattccatttggcaaacttgcttctctgtcaatatttcatcctcctttaaaccaggagggttattaatggcaaaagcattggtcttctttatgcttgatcagtatgactcaaattaaaagtgttctgctgtgtatatcaactcagtagcccacacccagttatctgggagctgatggttcagtcactgtattacccaaatctttcctgccagctgcctttcagacatttgttaaatcccaaccagagaccgggcagatagagagaagtaaatccgaagtgcgttttatatacagtctgttagcaactccaatgagatgatattgtgatgggaatggaatgggaacagactatgataagagatggaattttgaggttttcctggactttgggcacacagtcatgccccagtggtagataattgagaattcaccatatttgactaatgataaatttgatgatggagaaggatcattactacttcaattttatttgccaaaattactatattatactttccttaatagagtgaagagtcccctccattgttttctatttgactccaaacttccccttcctctttcagtagaacatctgcttacttaggaagtaggcatacaagtttcttattattatatctcttcctgttcactgcctcccgcaaaaaaaaaaaaaaaaaaaacaaggaagtaagggtagaaagtgagagttctttgaaaataaagtatatacatttaaaaagttaggaactctgttatctgcaccattctagaagagaagaaatttgtaagccatttagtccaacttgctttgggctttgaaaggggtgaacaataagtaggctggtaaaccagaaggcacggtgaagccttctcagtctcaacacttgggtgatcgtggcatcatcagtgtccctaaagtctgctacccaggttcttcccaaagccagttcaaatggatggagaaagctggactcttatacacacagttaaacttctgccacaattgggagaggtttcaaattctgttctgaatattaaagattatgacccagaaccttaccatcggtgctcaataaatatttgatataaattgactttacacatttttatacctttaaccattttctatattacccttgtcctcttggtttgatttttttaaaaaaatatgagtgcctctacatgccttatgatgctgctgtgttggtggcactttctcaagctggtcacatggcttctgagaaaggggaatagccctgtaagctcaatgagtagagacactgagtatgcctcttggcagcatcatcaagatcccagatgaccagaaaaagcttttgtctggctcttctgcagcatgggaaaagcctaaaggtgtctgcatcccaatagagacaattaaatcaacctgccaggttcctatagcaacaggctccttgaaggagaaagaggagagtacagaaactccagggcctgtggaagtcaagacagggtaaaaatcaatttctcaatcagcttctttcagcccatccctgctttgtcacaatatgataaagaagtagctgtgggcacctgtcactacactggctgactgtctcccatgcaagattgcatgcccattgcaaccattggaggtgagagggattatccgaaagggattagtgaagaatctgtcctcagggtgttggctggaccaagggccacagaggagggctgggagagcagtttgctcaaagaatggcagcatcagactttcagttaaaagagacagagtcatggtagccaattgcaaagaagtgagaaggtttttcataaacggtaattgcttttgttctggtacaaataatttgtatctctatgaaataagcatactttgctcacagagaggagaggaggtagtatgtgtgggtggggacggaggaggcatcagggtttgctgggcagaggaagtgtgccaggctgcctatcacaagcgcgggacaggaaaccacacagcattacccttgaaggtcgaagctccttgttagcccttactgttctccacggttgtctctctccaaacagcatcttttctttttgagccttttctctctcaacctcagcttgtggtgtagtgagaagagggccaattattccaaatgcttttgctgtatcattgtctccccttttctgcgatcttctcaagggagtactgtgaaaaggctaaatcccatggcactgacaacccacagagccaacagagaagctcaattatcacagtgcagcctgtttcttcctctgctggtggcagctcagtcagcccagctctggggcccttccctgcaagagcccattcctccagggtgacctgcagccctgtggctggaggaggttttgacccttattttaaaccctgtgatctcagtgatgaaactagaaatgcaagaaacagatggctctcagatgggataggatgcctggtgagtcaaagccagtatttcagaggcacagagtcaccctgggaggggaaaaaccctaagctccccagaaataacaccaggttacctcttcctctcctttaccttccaaatgaagatgaccaaccaaatccccctctgtcacctctgctgccacaatccatgttcttcaggatacaccccgatatacacacccctgttctctacccccagaatctctgctgaagggcatcatttgtcatcacattcaagaggtacgacccatgcttacatcatcctttagtactgatagtactcaggctagtactaaacttactctaaaagctaacgcttcagcaattgccttgggccaggcattctcatgagcactctttagttacctatacaaactcaatcctcacaacagcttcagatggagatgctgtgtctccatttgaaagacacagaatctgagagacactagagtctgtgaagttagccactgtgatataatgcccgctgatattattccaaatactcataaccttaacaactcacatttacttaccatgtatctggacctgtgtaagtgcttcaagggtactggcttcatttatctaaacaacactattaggaagtttgtatcatcagccctattttacagaaaaggaatgaagctaagataaatttgctaataacttgttcagagccatgcaactagtacgtgagctagatctgcttaactttcacctcctgccctgcgctgtctccttagcccgcatctccttgcttcttcatggtggacagctcatagcatagctggtcttgataggtgacatctgccaatggcagtggcaattgctctaccagcatctctctgcagttgttttccagagttttatcttgtcccactagccccctcccagccacagactgaaatgactcttctttcctaactccacgaactcctgacatgtcacacattgtactcagagcactgacaacaggcatctcatccttaagaagcttattaagaaataaggctatttttctctggcagcgaggaagccctcccaccccgatcaattgcccttctcatcttagagatgaaaataaagcccctggaaatctttctggtatgtgagatgaaacagggagtggagataaagtcagggatttggatttatccttgtcatggcagcattcattagagctgcttccctgagtcctcttcctcgtggtcaattttgtagccacccattggcattgtttcttcttcagaaggcaagattcaatacatcaaattatcattgtcctacttgcagcactctccatggatgctgaatggctggcgatcattgaaatgtgtgttccttggaagcatgttgggagaatctgttcgtaaaatacctttgcaccagacattttagtaaaacgcccagagcattcatacagttccgtttcctgaacatcctacataaccaagtctccaaaaacacacacatttatatcttaggaggcacccaaattaaacagctgtttctcaggcataaggaagacctcaactcctcaccacaatgtgtgttaacacaactcactccttgtgttgaggcagcatggccaaaacatgggctactctgcttagatttttttttttaatggcaagaaatgtaaaaggaaagagagaagtttaaatgaggaaataatgctctctttcttacagacagcagaaggaaattgatattctctctgccgcgaaaggtcaaaatgccaactttgaattgaactgtaaagactaaattccgaacaattattctcttcagcagttgtaaaaatttcagcaaattgcagctgtcttaggtctttcacccaaaagacctactcatttccatcagctgagttcactcttccaacctggcatgtccaacctagcactaaatccctttgcaaagtcagtctgcataacagcatggccaaaaccgagggcagctcaggcaacctgagcacaaacaccaggctcaacctctctgaaaatcatctttacacataaacccctggaaaaagtcgtagtgtgaaattgtttcagcggcctggcaaagcttttaaaacatgataaccatcacactttactcctctctgaaaggttagtttaatcgtagatcacaaaaaattggtttccacaaatgcataatggttcatctatgtcacacttgaactaaatggttttttaaatggagctgaaattattttgatgtgtacacagtcccggatttctatacaaccttttttaaccagcccatcaggaaccttgcctctaaagcctcattaataattcagatgtgctgatgactttaaaagatctatggaattgaagcttagggaaaaaaaaaaaactctgcttgacaaaaagataaatgaatgtagaaagaagctgtaggagtctggcaagctgtagatcatctcagaacagattgtaactttatcattctgtcagggggaataatttaaagcacttaatcagttagcttcactgtgaggatgtagcattatgaattcctatcgtccaatctgttcaaatcaaagtgaacttaattataataggtgagtgagccagagcaggagagggggtggggagaacgaggcaagaggcagcaagtttcctgtggggtaaactgagctgccgcattaaactggggcgaggctttgactcaggcatatcccagctccagtgacagccctcctcgacattgacagctcagggcacttgaaacagcagaagtaggaactgaggagaaacaagcagagtggtcatgaactgatcatagataatttataaatcattagccaaacatgcacataccccacccccaacgccccctatcaaaccaggtgagcagttttcactaatgtgtccattcaggaccactgacaaggcagttacaaattgttctggtaagcagaaaaagcagctacagaggccattgtctctatagcagtggacgtgcttgatagcttttaccctttttctttttcttttctttccctaagccactaaagtgaggcatatgattcccaagttagaatgtcctatttgcccagtcctttcctatctatacacatggccaatttcccagaaaatttcaatcctagaaagaggtggggatgagggttgagtcttgtaaaatagctttgcactgctaagaggatgctagaccattttcattctcaccccagcccccaaacgccctgactcagcattctctctcagccatttctgtatttagggtggaaatgaaatgccaagacttcattgagctcccttgtcgacagcttgggttattatagtcagttaagatattgccacttggaactctattcataactttataccaacacagagttttctttcttgaaataaaagccacctcaaaatcctctttaaaacattggtcgctattctgattttcatagatttttggccagcaaaatctatgggtttagtttagaccccccaaagtggctacaaatgaaacaggagagtggtatagttgagacatggctttaagtgtgtgtattataagcaaagccaagaaaaggctgggaggtggtgattctgtgtaagattctggatcactcgctctgcagcaagggtgatggtgcccttccgttccactcaaatcaatggatgcacacatctctcctcaggcacaatgtctgtacccaatggctgatatatgcaacatcccctccccaccaaaccttttctggccatgaaattaactccaagggacattgccagagtccattctccaatccctccttagcctctgaggtccgcccatggtgcctatgagtcccagtggcacattttgttcatcacttgctacaggaagcagaggtatatttcaggttctggggtcctccctacactgcactgtctctcttagcaattactcactgtcggcttctatcgattacctttttgcgtttttcaatgaactttccaaaggctttaccctaggactaattaaacttctcatttctccttcttgttctctatccattttgccctttagcagaaaagaaatggtttacagatgaaccggataatgcctatcccagaaacattcaaatcaagcccatgagtacccacatggctaaccagatcaaccaatataaatccacaagcagcttgattccaccaatcagagaagttgaagatgaatgttgactcccaggagaccagaactatttttttaaagcctgacaaacttcataaatggtgatgtgacttttcttcttacatgctgaatcactggtggaaacgttaggataagcaagaattgccagaaaataaagtagacagatctttc

SEQ ID NO: 202 - DNA, 305733 bp, Homo sapiens
ccgccaagcatattgctaggcacagagcaggtgtgcaacaaaagttatttctcaggctttccctcctctgagcgccgtcctccagagggtccggagtgtagctgggggttggagcagcagcctcctaggcgatgggacagagcccacagggtccggtatgccacggtttcttcgtcagaccctgggaatccaacgtcgcaaaataaacacggccgcgccgctaatcgccagttcggaggaaacaaaacagcgctgcgctgggggatctgggcaaaatcagccctccctcctcccgctccttcgccgcggccctcccctcctcgcgctgctctcgttcgcttggctcagctcagctcagctcagcgcagctccgcggccgccaagccgaggcgggcacggtctccgagtcgcggacgccagctccgagctccctctctccgccgcgcctccgccaggtcgcgccttcgtcgggaccacttcgggcaggagtcgcgtggcgaaggcctgcggccgcggcacaaagttgggggccgcgaagatgaggctgtccccggcgcccctgaagctgagccggactccggcactgctggccctggcgctgcccctggccgcggcgctggccttctccgacgagaccctggacaaagtgcccaagtcagagggctactgcagccgtatcctgcgcgcccagggcacgcggcgcgagggctacaccgagttcagcctccgcgtggagggcgaccccgacttctacaagccgggaaccagctaccgcggtaagtggccgcccggcgtggcattaggagagcgggacccggtccccggagggcgccgacctcgcggtgccggaggagggcgcgcggtctccgggcgcgtggcgcgggtgcagcccggcaagggcccttctgtcctggctgccctcggcccttgcagtcgcgagctcggcgcggatcataatccagcgtcccgggccgtcgcgggggccgcagccaggagaggcaccccgcgtttccgacgcgcggttcccaggcggaggatgtaactgagccacacgtcacgccggcctgactgcaagggaggctcgcttctcccccggccgtctgcaggagggaagtaaaactgcctttctccaaatcggtctggaggggacccaggcttctcttggtcgggtcccgggcaaggcagccactccagctttccccgctcagtccctgaaggagagggtacccgattctcaaagactggccctgggcgggacagccactccggcttccctggataggtcccttcaggagaagggactttggcttctccctaaccggtcccggggtgcgggaaggaggggcagggacagcctaaagctcctcgaaagggtccttggaaagaaccccaaattattctctcgtggtcccagacgagatagagtatcttgggtttccagaacaggttcccagtggggacagggtcctcaaagagcttggggtaagctccgagctgcaaggggaattggatgaagatggaaagagaagccccgatgcccgaggcctgctccctggaggccggggaaccttggctccggcagctcggagtctccacgtcccagggatgtcgcgcctacgccgctcggctgagagtggggtttcgggagctcagggaggaggtgtccaagcaggtgagagcctcctaggcgggacaggcagttcgaccagcaccgatctgaagacgcctgactctgtccccacgcccgccacctcgctcctcagcagggtcatctccccagacatcgtttccccgtgcagcagcagccgctctccgggtgggggacaggtaaccaggaagggaagcgagcctgtctggcctcaccttagctcccgccagggagcgtgtcctctcaccctcgccccttcataagtcagctctggtgctaagcagggatgagcgggtcactggggcacctggtggggcaaatgggctcccagctgctgtactttcctcctcgccttcccagttccccagagagccttggacggaagcggtgggagcaacacaggagaaagtctggggcagcgtcagcgggcgccagggtcacgccggagaccaaagccaggggccacccttcttggagcgcttttccccctttcccgggtttgtgtccccgactttctccacccggagctacccaaagccggctccttggtgcccttggcaccttggcgtgctgagcactttgcgaggaacagtctgaccccggcgcgcagctccgcgggatcctgggtactccacgaagaaagattctgggcggagaacaccccgcccagcccgggagggagcgcgcggcttggcaccgcggctagagcgagccgcgccgacgggcggcgactgccactcggtgcagccgggaggcggccgatcctccctgtggaccgcagggaagcgggtatgacttcagtggcctattcggccctccccaaaactgaggacctgagttcacaggggaaactgtccccgctccacgtagcagagaaagaagtggctctggagtccaacagacttgggtttactcgctgtgtgaccttgtgcaagtcatttaatttctctgcacctatttcctagctggaaaaaaaaaaaagctgtttatccaccctctcttggtggtagggagtaaatgagtttacaaaggtgagtgtgcctgagctaaaagagattcctaataagcctaacagttgaatgtgaggcctttattggtttactaatggaggtaggttcttgatcagatttttgtttttgaagagtgttgtgcgtttgaaagcaggtttcctcagctctcctccagtcccattcatctaccagtggttatttgggtcctcatgaattaattgaatgaatgaatgaggtattttttcatatcaggagccttgcctaagactgttgctaatgcaagcccaggaagattttttcagtgacttagactagtctgaggttcaggccaagtgtacccagcgtctcttttcacactaatcctccgtgttttagttgagcattggcagctggtggccctagcactgggaaggagatacagctggtattcacggggccaaagaggtttcagaactacctaaacgtccagggccagcaggtggggaactgggactggatagggagtgtcctggactttcaccctacaggctactcctgcctaaacagccatctggactttgacaccccaactcaggctatagattgggcaatcatcttttctcccttcttatggctaaaagaccttggaagagatcttgcaggaaccatgctgaggttttccaagtaaatatcctgcaattagcaaacctgattctgccactcaaagtccgaaagaaaaggtactggcctagtttgtgacattttctgttggctccttctttcttagaataattatgttaaaagtaactcaaacacattctgctcattgtcctgacttaaggctgtgaagctggcattcccctggtgttctatttgctttttaattttttcatgaattaggattcctcacaatccttggaatcaatgacttgttttcctgcctcaaatctttgtccacagtattccagttcatccccaagcagcttctgttctttgtgcctgctgtctaagtacagtctttaggtactctagaccggaataaaatggtcactattaaaaaagactgaaacatggagtttcttccccaaaacctgaatccagttgagatcattattttgtcttttccaagttgttagtattatattgatttccttttctttcccaccacttctctctactctccctccctcttcccacagtcccccctccctccaacggcaataattgtgctttagaaagctctgaaaggcctgctctgtttctggccagggcctcctttgaaaaggagattacagtgattaaaaataacaagttgaggatcctcaaggggcttcccttatacaggaggacaattcgcaggaccagcctttcccagatcacaatttcaagccaaacagaagaaaatccactgaaatattcaagaattgattgaaaataaaagaggctcttttgtcttactggaggtctgtttattaggaaaataaagtcagactctggctaatgagagtggcttttcctagatgtattttaaagagacatttcaaggaacttgatgggaaaagaatgtccagtagaggtttcaaaagctggtccaacttcaagcataattgaggggtttatcctaaactgggaggtttggagacctccaaagctgcatggtttttcctttgtcccacactgagacacacactgaccacaggggtggacacctcagcctggtggaaagcgcacaggctttgatgttgggtgggttggtttcaggtcctccttggtcacatattcactgtgtgatctcaggaagccacttcacctctctgagccaatttctccatctgtaaaatgagggtgttttgattttttcccagcattcctgtgagaattagaaataattcatgtcaaaagaaattgtcacacagtggttgctaaaaaaatatgttatgagatgattattttggaaatagaaaaatacttagcagcaaagccctggataagatattgtgttaagttcttccgactcatctcacttattccttacagtactttgaggaagtttctgatcgttactgttttatggatgagaagactaaacctcagagaagtttattccttatccatggtcacacagctaataatcagcagaatcaggatacagtctcaggtctgtctgactcctaaatctgtgctcttaaccagtcttatgtgctgactcaatgaaattagttgggaatagaatgaaattcactcagctaccctcagccttctggatggtgagccttccttcaaggaaaacagaacaacaaatcaagatagtaactgacatctctcaggagaattactttatattactacaaagtaatataaagtgataaatccttattcacatttgctgttttctcttattggcttcagtgttgcatttccccataaactagaggattaatttagaaacatgaagaaccttgtcagcctttggccaattccttttgtttgtggggaaacaaaaacaaattggataggaaaaaaaaaacccagaaagaaaaaaaaaaaaagaaaaaacagatttgactgttgttttgtttttacatacagatgttatatgaccatgcctgtaaaattatatgtttggaaaggacatatttaggctctaagaaatttacacaagatgaggtcttttaaataaactatttcctggatggtggagtttttaaaaacttaagtgctgctgatgatattataattaagccacccctcctacctctcttcccttttttgcaccattccctgcttttttgttatgtaactatttctaaccattacttaagtatttagttcaaactgataataaaaattagaaaatgcaaacatagctaatgcttaatggttgtggagattgtttattgctctgagttttaggaaatgaaagaaataaaaacatacaaaaaagcatatcaaaatggaatttttcaaggtttaaaacttgagtactcccccatacacagataagctgtttcattacagctgactctttcagttgcatcaagaagctataatcactgatacgtttaccactatgggctggtatatcaggagcttttcactctcacactgtccatttgcttgttatacagactgtcacatatatataggtcaatatcaatttctgttgtgaggtggggggactcttaccatgttatattagtcatagtacaggctaagctcatgttactaacagaatccaaaacacagtgttttaaacaagaggtaaatgggagatccagcatgatgggaggctttgctccataaggccatccaggaaccaggctccttctaccttgttccctgacatcttcttgcactctgctgtgtagttggtggctacttagccgtgtgtagctatgaagtacttgaaatgtggctattctgaatggagatgtgctgtaagtataaaatacacaatgactgttgaaaatttagtatacaaagagtaaactcattaattgtgtattattacatattaaaattataattgtataaagtaaaatacactagttaaaactaattttgcctattttcacttatgttaatggatacctggtaacaaaattaatttcacccagcttgagcttatttctactaaacagcactgttttaagttgctgttctcctcagcaccgttacagccgaggagaacctctgcacacctgtattcagtcagcatgcagtggactggggggagaggaagtagaggacttcagttttcttttaataatgtgacccagaaactgcacccagcacttctaaacacactccgttggcaaaaattcagtcatgtggtcatacctagctgcaaggaaggctgggaaatatagcatttagctgggtagccacatgcccagctaaaacttgaagaatttatttttcaaaaagatgaaacaaagtaaatttctaaggatcatattaacggtctctgtcacatattttcatgcatagtcatgtaaaaacacaatatatcttactttctcagtgaaaggtcagctaggtgggtcaacttgacaacatataaactgatgttcctgctaagaatcagcagaggaagccagatgcagtggctcacacctgtaacctcaacactttgggaggctgagacaggtggattgcttaaccccaggagttcaaaatcagcctggacaatatggcaaaacccatctctacaaaaaaaaaaaaaaaaaaaaattagctggctgtggtgtctcatacctgtagacccagctactcaggaggctgaggcaggaggatctcttgagctggagaagttgaggctgcagtgagtgaagattgtgccagtgcacccagcctgggcgacaaagtgagaccctgtctcaaaagaagggaaaaagagcagaggcaggagtgctggggtgtgtatgtgcaagcttatgttgtggcttgttttgtctcattctcctttctcaataaaagaggaagcagcaaagaatgaaaggaatgagggtaaggtaaatcaagaaaacaaaggggtggtgtgggaagagaaaaagaaaaatgaaaacccactggggtatacattcagaatgaaaatgaaagaaaatatttgagtatggcagagtcccattaggatgggactacagggctagatacaagaagagccatggaaagcaaacatcacataagtcaaaattagtcctttgaaattatacgtaagatataacccagataccagcttcaacctagccttatctaaacaccctacccccaatattcctgtaagtgaggaatagaaacgaattggcatgtatcaataagtctagcccttctagtttccctccagcattggaagagagcaatgtttcctcagttgagtagcagataaacccttggtttgctctgacatgcaagtacaaaatcttcatcatgtgatggagtaagggagctgagaggctcatctcatgctcactcaggcacatgcatgcattgaatggagtagcaagtggcccaaatcatttaaagcattacattctctgttttttctcctccaatagtgtgcagttgtgtttgatttttaccaaatgcacctctcttggagcatctatggtgtcaggaagcttgctatatcacataaaaagctttttgtgatgcttgtcagctcctgctggtataaaatgccccacttttacagaatgttttggcagggatggagttggggtgcagataggacagggcaaggagttaagtgagaccactagaagtcctttgtgaggtctatgtagagcaggcttctacctttcgcagaatattcataaattccatgaaatgttcaggaaaacttaagggacctacccacatccactgattttcttgaggctaggagacccataggaaataacttgaaccctctctacagttgtggttgagatatttgccaatatgtctcatggactgggtgagagaaacagggaagagttccaagaacaagtcaccatctgtggggcaggagtgtgggcaggtgggcacagtcacagcaggatgaaccaaatggtgattctaggtgctacaggaagctcttttctcctcctcttcctcctcctcctccttgtcctccccccaactcctgccaacactatcctttgaattttccaaatacactaagctcattcgctccccagggccttcatccttgctcttcatgcctgggatggttgtcctcagatctttgcatggctgactccttgtcttttaagggaatctctttaaagaggctgctctcactaccaatttatgtttcccgtcactttcgcctgattttgttttcttcatagccttaaacactctctgaaattctctcgtttattgtctgcctcctacagctagaatacaagctttatgagagcaaagactttgtctttcttatttgccattttatcttcaattcccagaacagtgcctgggcatagcaggcattaaatcattatttgttgaaaaaaataaagtatcattgaagccccaagaaccctggtgtgagctctctaagagagctggatggaggaaggggaaggtatttctctctcagccagagagaaaggtgagcacccaagggatggcagacaggaggcaaggagctccaggtggtggcagcagagagaaaggatgccagtgccacaggggcgttggccagaggctgagggcagatggcctgtgtccagagtgcagaccactgggagggaagagagagcagttgcatcatggtggaagctgaaacgctgctgctgtggcatgaaaagcagagcaacagcaggcaaaagggcagaggcaaggggctgccaacctcagaaactggctctgagaaactggctctgagtatctggagaagtaggcctgaggggattattgagccatcaaacctagacatcaattattaaagtgacattccctagaaccagcacattgtggagtcatttgtagtactttccaaacctagctatgcctttggagagtgtaaaaactaaactaaaatttaatttaataaaaaaacttcctgggccccaccctaacaaaaggctggattccaggaatcttatattcttctttcttttttcactcttttaaaggaaaatgatgagacacaaagaaaaggtggcccttttcctatgagcatgcttccccatcaccacctctcctagccccagccccagcctcccacacactttagcacctggtcacatcattgccctatcctgttactatgggacacactcatttagtgaccagtggaatatcctcaaagccaacatgactgcaacatttcccgcttggcagtagggtgatggggagaagagaaccatgagttttccttaggtggccacaatcacagactggcgaagcttgagccagggctgacttgcttgtacttctctgccaccaaagtctgcctaccatgtaactttcacacatctgtccaaggttctgtcctttggaatcaaggaaaataaggtctcccctgggccatatgtcagcccttgagatgtttgtgaataaatagctgtcatggcttctcttctgactaaaatgccccatttctttaaccattctttgtgggttgcagttgcttgctcccttgtactttgtgccccagatgtggtctgttaggggcaggacatgatagaatgattatctccttgtcctggacattgtggttgtgtgaagcttgccaggtcttgtgtttgctattttggcagctgtgccgtagtctggaatcacactgagcttgcagccaactcaaattcttgcaattttctggaaggcctgcttccctctttaacctagactggtgaaaatggtccttgaacataaaatttgacatggtttatcgttagatttaatccagcatgtttggatccatccctgtagctgtcagccattcatgaatctgtatttggtccctgagtgatttattcacataatctaattttggattatgcacagtgttgataagaaggtcttgtaagtctttatcaatgaagttgataagaatattgagcaactcagagtctaggatagagccctctgacattccttagagtctttctctaaagctgatatttagctaaatagttttgaagtcaagagatctgctgtcatcccaatgacatttacataccaactgccacccccagcataagccacctcagtttagttctgaatactgtttcctgagcctgctggtgattcttgtagtttaggcagagtgttttctttctttgcttcaaaattagtcaggactctttccactgcaagtgataggaacaaagtcaacctaactaaagcagaaaagggaatgcactgattcccatatttgcaaagcccaggggtggctcttgcttcaggcataaatgggtctagtgactcaaatggggtcattccatctctctctctctctctgtcccccgttccctccttcgctctatctttttgtccctcgcttctaccttctctgtcttgctccttccatcctcaatctcttggctgtgttttgccctcattttttcttactacagataaactttctccaaatgacagggaggatagctgccagcaaccttcagtgaaaatcctcttagctcatcctgtgactaaaagaaaagcccctttccttctaactacaaactgaaacatcccagggaagattgtgattagtccagtatgggtcacatggccagggcaatggcatggagatagactggatctggatcacagtcacttttgtgacttgatatttgaggaaggaggatgaactgtgattggaagccccagtgaccacagggtcagagtaggggcagcagtgggggtcccccagagcttcctgccctcatccacattcccagctacgttctcttggctgacacatctctacctccccagaggcatccttcccattattcctcctgctatccacgtgttgttcagctcaggacccattcatctggctctgagctgttccacgacgaggtcacacaatggggaaaggattaacttttattgagctgctgcaatgtgcttcattgcattatctccttgaatcctcatgacaaatccacgagatgataattatgatccttatttcacagaggagactgatttatttttaatatattttattgatttagcaaatgtttttatatacttcctattaccaattcattaattgtcatgatgacaacaggaggtaaatactattaaatattactgctgttttacaggtaaggacatgtagacaaggagagcttgagtaacttgcccaaaattacacataataaacagggaaatttgaaccaagtctgttaactacgtctgttatagaaaaatgacccttacaaatttaagtatgcatgatcttcagtttgagtgggagaaacttcatctctgcctggggatgctgagagcactggctgaagaaggccatccaggggaacagcataatccaaccccaccatcctcacctgctcacttttggattctcagtcttgccttccagtcttccaggccatcaccagcaaatcttttcttgcctgacctggctaggtggcctgaattactgtgccaaatttttaaatagaaatatatgagttgcagctcctcagagctctggaagttgtgcagaatagaaaggggagcactgtgactaacttaatgtcccaacagtctttataactccatgttataagttaaagcagaagctgacgcgcattgtggttgaggtgtgtagcaagactggggcatttcagtaacacatagcaggtggatggcaggggctggccataggatggagctgggactcagggtcttctcattgaggttggagttctattaataattctgaaacccaagagacagagtgcggaggaagatggaactggacaagatccagtgagggtaataggcatagaagatgaatttgggtaatagtttattagagtttttgttagaaggttgacacaccaacatttgaaagacccagaaagctatttggtaattaggtagggtaagtgtacccaaggatggaaagaactctgccctgggtcgggatttgaggccaggctctagtgtgaaatatcagtcttcatataaataaggcaggcctttgttactgatgtggcttttagggcaaagctgtaattcaataattacacaacctccagcctgatcttcctaaaccataaatctgaatatgaaatgtcctagcgcaagcccttcagtactgcctcatcccccctccccagggtgatatccacacttcttatcaaggcattgaaggcctttgatcatcttccccctgcttatcttcctcaccaagccttttatcacacccttcctcccagaatgcaacttatgaaatacagaatcagttctggtttccagggccaagactggcccatcacacatttctgctacatgggatgctgttgattcccttgtccactggataaactcctattcttcattcaacttacaacacagatactacctcctccttgaagcctcttcgaattcacccagatagacgcagatgttctctcctctgcaaccccagaacacattgttcatacctccataacacactttacatgttataaaaaatatctgttgctatattttttcccccaggtactagactgtgtgctcctagagagcagacgccatgtcttttttactctgtgtctccagggatgtagcactgagctagtgtagaccaaatgctcagtaaagataaaaggatgagggaggttgatgtattgctcaaggtaacccatgggaactttggaaaagggaccagaataggaatgagaaaactatgcatttaagacaaataaaaccttttttgttcattcattcaacaagtatatattgagcatttactatgtgtaaagtggtatgctagatgctaaagatgcagtggagttcaagacaatttgtttctgcactcatggagagtacaggttattaggggagacaagcatttaacaaatagtttcataaacacgtatggaactgaaattgggtgagaggtattccagaaaaggggtattgtgtggaggtgaaaggggcagggaggtcctcacagggcactctgagtgtcatgggctgtaggaagccttgctttattataaggacttacccaaatctctccataacctgaacttgtaagaatcgtccccaaagccaattctctccattgcaatccttccagtggtccttcattggcacctactagagtttttctttggaggttcaatcattgttcctgaggaccagctctttgaaacacattgttgggtaatcagcctgatgagcattatgatcttttatcataatcacaaatttcatcataatcttcatccccaatatcaccatcaccactcaccaccatcaccatcaccatcataaatactaccaccatcattatcatcatcatcccttaaaattcttgaacagtttacatgttccaggcactgggataaatatttatttaactctacgttcctataagaaaggcgatatcatcaacctctttttaaaaataaggaaatagattaagtaatttaccagagatcacataagtggtagctctgggattctaatcctaaatgtttgctgttaatcagttccccggatgtactcacaagatggctctgaatggaattccttttttttaatccttcataagcatttttctttaatttcttggatctcttaatagcctctcaggggaggcaattgggaggagtcattagagagaagattctattatttactgccaagcagtcattttaggttattactgggactcagaacacactgcacatttgtacctttcagaaggaagttgtataatgaggttctctggaaagatagagtctcctctattccttcaaattatactgtgtaacaacatcatcaccagtgataattatggattaaaaccccacactgagttcagcttccagagccttcatctcatgtgttatatttaatagggttgtgtacaaccttagctttctagaacctacaggaatgcagtattatgggaagctgagtttatgattagccctttaagcacactgagcagatgtacaaaagttgggatatttatcattcagaaacattgtttaggaatcttttaatcaaaatataacttacataaggaaaagtttacaaatgatagagtgtggtgaattatcacatgttgaatatactcatgtaaccagcacccagatcaagaaacagatcatgactagctcttcagcagcatcccttgttctgcctccatgttgcactccctccctttcctgtacatgttactactgtcctgacctctagcaccatgaattactttgcctgtttttgagctttatgtaaatatatataaatgtaatcataccatttgtattctcttgtgcctgtcttctgtcacttgagattacgtttgtgagatttatccatgttgcatgtggcagtatgtgttcattttcctgcctgtgaggcatttggttatatgaatatgccacaatttatatacctattctagggctgaagggcatttgagtatttccacttggatgctactacaaataatgttactactaatattcttataggtatctttggtgcacatatatatgcatttctgttgatttaagatggtattgctgggtgatagggtaagagtatgttcagcttcagtaaacactgccaaagaatttagcagcaaaattgctaattttcacttctatcaacagtgtgtgaaagttctagttaacatcactggatattgttaattcttttaaatttagccaaactgttagatacgcagtactatttcattgtagatttaatttttatttccctattgactactgaggttgagagcctttgcatatgtttattggccattgggcaccttcttttgtgaagtattagtttgtgcatttgtctttcttatttttcttctgttgagttgtctgtctttttcttattgatctgaaatagttctttatgtattttagataaaagtcagtttctggttatatggttgcaaatatcttctttgacactgtgacttgcttcttcactcttaatggtatcttttgatgagcaaaagtttgatatcaccccatttatatatcttctcctttattgttagtgcttttttatgctctatgtaagaaatctttgttactccaaggtcattcgcattttatttcatgctgccttcttaaaattttgttttgcttttcacatttagctgtacaatctatgtggaatttactctgtgtatgatgtgagttaagggccaagatttacctttttctgcatggtcattcagttgtcctagcaccacttactgaaaagattatcttttctccattgctctgatgtattaggttggtgtgaaagtaattgtggtttttgccatggcaaaaccattaatggccaaaactgcaattacttttgcaccaacctaatacatcctttgtcataaaccaagcttctgtatatttgtggaactttcctggaccctaagctgatcaactggcccatttttcttaccttgctatagtccactggcttagtttctgtagctgtgtaagtcttgatatctgggagtataagcccttcaattttgcacttctttcattaagattgtcttggacaatcttggccctttgcatttccatataaattttagaaccagcttgtcaatatcacaaagagcatactgggattttaatttagattgatgaaacctatagatcaatttgaggataattgacatctttagcaatactgagccaaccagtctaggaacactcaagtaaatttaatagcacgtcaactccgcactggtcactgtgctgagcttagatgggttcttacccttgaacgtcttacaaatgtgtaaagaaacacataaacacaaaatataatctaattcgatactcttatcactgataataatgagttcatatttactaaggactttacacatattacttcatttatagcttgcactgatactttgaggtaagtgctgttactatgcctattatgtaggtatttttaatttcagtagggtccaagagaaaaggcatgcaggtctttatggggaaatcagaggaaacatcacacaaacggtggagatttggctgacttttgaagtttgcagaatggaggagcttgaccattccaagttatatgagtagctcatgaaaaaatacaacagggcgacatgacatggattttcaggaaacttctagagagtgaatccaaggattgaaatgtagtatggcaggggaatgggagcatggttagtgaagctggagaggcagagcctgagggcttcttggtctgcggagtttgagctttgtcctaaaggcagtggctgtggagcagggattatctgtcttggctggggttccccggaggctgattgtattcatttcctaggactgctgtacaaattactataaattgttggcttgaaacaacataaatttattctctcatatttctggaggctagacatctgaaatcaaggtatccgacggtgttttcttctggagggctctgagagaaagttggttccatgcctctcgcctggcttctggtggttgtcaacaggccttagctttctgcggcttgtaaatgcatggctctaatatctgcctctgtcatctcgtggcattcttccctgtgtgtctctgtgtcttttcttatagggacataagttgtatgggatttagggcccacctgaatccagcattacctcatcttaacaaactgcatctgcaaagaccctatttccaaatgagttcacattcccaagtatggattagaacttcaacatatcttaaaccgtaacacaagcctcagatgaggattcagatgaaagtgattcttttaaggaaatgctcccaggggaaactagtaagagagtaggggaagcaggacagcaactgggaaggtgtcctgccagcctgtgatcccaggcatggtcccttcaggtagtttcagtcagatcctgcggggccattttggagtgtaaagtgcctctaagaattgtcctcacctgatgcaaggcagctggacctttcatcttaggcagagtaggctccagtaacctgaggaccagggacacaagagccacaggggctggccacgggaagcagaaatatattagtgccagggtcacattaaaatgtaaaaaggtatttgaagaaatctggatgaagtatccttagtgtttgttactttgtcctctgttccctttcctccagaattgtgtataatggccttgaagaccacccaccctcaccctagagagtctaagactgctttttggctgtctgtctgtccttcagagattcccagctctgtcccctgacagcataaccaccattttttttgcttgacactgaacactacacttttcttactcttctttgctttattgtgctttttttcccctcattccttctttttttttttgacagagtcacgctctgttgcccaggctacagtgcagtggtgcaatctcggctcactgcaacctctgcctcctgggttccagcaattctcctgcctcagcctcgtgagtagctgggattacaggcatgtgccaccatgtccggctaattttttgtatttttagtagagatggggtttcaccatgttggccaggctggtcttgaaccctggcctcaagtgatccacccacctcggcctcccagagtgctgggattacaggcatgagctgccgcgcctagccccttctttctttttttctatctgatcttttacagacatcagtagctcctttacttttgtgggataaccggccaatcacagcatgtcatttaccttctttatgtcttagagttctttgctgtgtcattctgttggtggctcaagagcagccactacattatccaagacagtggttttatttgttggagttttagggtacttctttttattattattattatattttaagttttagggtacatgtgcacaacgtgcaggtttgttacatgtgtatacattagggcacttcattttcaagactaaaactagtttaaggaatttggaagactaaatgcccctctttaacaggaggctgcatatcatactcacaaatattatatgtcaaatgaattgattttttaaagtttaaaaacttaataatcagtcaatatttgtggaagatctataacatgatgaatatattcggtttgtgaagccttggatatagtgttaaactggggagtgggccttcaaatctgaccctaagttgcccactggatgattttatgatcttaggtgtgtctgttgacctttctatgttttactttcctatccgtgaaattggagagctgaattagaagatacttgagatcccttgaaggtctaatagtctgtaactccatatctaatgtccaggatcttagcacttttatgcaggcagtaaagtaatttaaatctcaatttacatcaatttaaagaaacttgaattgaacatctattagatgccaggctctgtgctaggttctggggataaaaagagaatgaaaacccagcccctctcctgtattagcacagcccagtggagaaggcaaatcaacaaagaattgcaattcagttcaaaaaaatactgcaataaaagatttccatctcaggagactgggggtccaatgggatggaggaccatgattgccatgttgagaagatccttgagctagattttttttgttgcttttgtttttgttttttgagatggagtctcactctgtcactcaggctggagtgcaatggcacaatcgcggcttactgcaagctccacctcccgggttcacaccattctcctgtctcagcctcccaagtagctgggactacaggtgcctaccaccacgcctggctaattgtttgtatttttagtagagacggggtttcaccgtgttagccaggatggtctcgaactcttgaccttgtgatccgcccacctcggcctcctaaagtgctgggattacaggcgtgagccaccgtgcccggccgagctagattttaacggaaaaatcgtttcctgggtagatgtaggaatgaagagtataacagacttataattccagctgctgtaacaggtggccctccacaacataagtttatttccagctcatgcgaagtacagtatggatgtttctggtcagtaggtgattttccgtggggttgtttaaaatccccagtttccttccctcttgtggttccacggccctgctcctgggacatcagagtcttctgctggaccctgcattaagcaggcaaaggcaagagagtgagagtgcagggtcatgtggaaagcttgtacaggtcaggcttggaagtagagtatagcagtactcccttatccgaggttttgctttctgtggtttcagttacctgcagtaaactgtggtccaaaactatcaattggaaaattccaaaaataaacaattcataagttttaaattgcatgctgttttgagtattgttatgattgtgtcttattagttattgttgatttcctactgtgcctaatttataaattaaactttatcatatgtatgtatgtatgtatgtatgtatgtatgtaaaggaaaaccatagtaagcatagggtttggtactatccatgatttcaggcatccatttggggtcttggcatgtgtcttggccttatctgcagggggctactgtatatcatgtctgtccatgacttccactggcagaacttggttataaagctgacttaactgcaaaggaggctgggaaatgcagtgtagctgtttccacaagaaaaatgaaatatgttttgaagaacacacagcagcctctgccacaaaggtcatcctacaggattttgtgctgtgaaggactagttttctcttgggccagtctaatggaagtgtaatgttagacaattgtgaagattgagtttctgaccagggactatctttatcaaattgtggttattgggagagagctcaccacacccctggttgggtcaagaatccccaagtaagatagcagctcagatatttaacaggttctgaaatgtaagagggagctgggtgaagagggtaagagttctcacctcaatggatgaaggcctcaacactgtccacggcctctgtaactcacaggtctgggatatcgatggagaactcaggtctatcccatttgacaaatggacaataattgattcttatacttaaaacctgcttttttctctctctgcagtaacactttcagctgctcctccctcctacttcagaggattcacattaattgccctcagagagaacagagagggtgataaggaagaagaccatgctgggaccttccaggtaagaccctgcctgggcttattcagtggccctccctgccctaggaggtagaggctggagaggtacaagtgtctcaggtggcttcccatgcagtcccttgaccgttggccaacgggggcaggtccatttgaaagggtcatcatggagcaagcagcaaatgccgcacacctatctgagcaaggttggccatggggcaggccttgttttgtctcagcagatcacggggctcttctctgggcccacagtgtccttcagcagccaagcgtggggagagcacttggagccctggctaggcctggctgttttgcctgcacaggcatttcgtgattgactggttaattctcaaatgtaaacggaacaagagctcgggaccgccaggctggagggagttcaaagcacaggagaaggactattaagggaatgtagagattgatttatgagggaagattaaaagaattaaacatgcttttcttggccaaatgaacagggccgagtttaagaggtggtaatggtctttaaatgtcagtcctcacagaacaacctcctcaaggggaagcttcatttgactttgcatgaaagggcacactaagacaaaagtgggtcaagaaaagaaagggaatcgcacagacaaggaccccgacagtgagtcatatttcactgtggaatattcttccaagggaagtggtaggaacgtcatcccctttcagaggtttagaaaagagccggcaagttgtcagaacacatcccagaaggactggagtgatcctaggaggaggcctggccaaatttgctgtaattacttctcatctcagatttccattgttctggaattcatttttatctggcatttgcaaattaagaagaaaaaaactcagagaatacttatacccatagctggctgctggagactctggtgcaatctgtgggctccgtggaggaccctgacccaaatacctcccttatccaaaggcatcttttaatccttgtggccaggttgtaatttttaatcctgtgatttaaattatttttctgctctctgggattctaggttttgggcctggtgagacttaattccacgctcaccgtaatgtccttctatggcaaagaacctcttggcatgtatctgaaagggtgacccaataataatactagcaacagccaatatttgttgggtacataccatatgccagacactatgctaagtgctttactttatcttagtttatcctgtctttgtttagtttatctttgtttaattctcaaaacaaccctagtatgtaggaactattatccccatttttggaccaggaaattgaaactagagagattaaatcacttgcctaagcttgcttattgcttgttttagtccattttgtgtttctctaacaaaacacctgacactagataatgtataaacaatagaagtttatttcacttacttgacatgagactgggaagtctcatatcaaggtacctgcatcttatgagggccttcttgctgcattatcccatggggaaaggcagaagggtaagagaaggtgagagcaagaggggtccaaactcacctttataacaaatccactctcaagataactaatccactcccacgacaaccacaatccattcacaaaggtagagccatcacgacttcatcacctcttattaggccctacctctcaacactgttgcattggggattaagtttccaacacataaactttgggggacacattcaaaccatagcagcactgttctggctaaattcagtaagttgatagtcttctctgactcacagttgtttctgcttagcttaatccttgttcttgcaactgattggtgaatacagggccctgctcatagtgggcagcgcataaatatttgctgaatgagtggataaacatttgactctttctgctagtgtccagacctcagtcctatttggaactgttgttgaactcctatctctgtatgcatcctcccttcttcctcctcttagagcttcagacatcctctcttgttacacagcagtggttctcagaatgcagtctcaggaccagcagcatcagcaacacctgggaacttgttagaaatgcaaaatctcaagcccatccagacttactgaatcagaaactctgagggcagggccctcacaacctgtgttttaacaagccttcagggtgaatctgatgcatgctcagatttgggacccattattctaatgagacatagaccagccctctaacaggatgtcgtccatcatcacgtcaacacatctgtctgttcctatctattctctcattgtttccaccagccctagagggatcaaagtgggataagaatatgaaaatgcctagcatatgataacgacaatagctaacacttaaacagtgcttgtgtgccagatactgttctgagtggtttatatttgttaactgagtttatcttcagagtgacatgatgaggtaagcattattatcctattttccacagaagagaaacttgtggcaaagaacaactaagtaactttcctaagatgcccagctctaagtgataaagctggggttcaaacccgggcagtctgtctctgggtacctgcctgtgaccactgtgtatgccatctctcagtgtatacctgttaaatgaaaaaataagggcccactatgacttttatgacagtctctgtgccaggtgctttatatgcattagccttttcttttttccccttaattcttgtagcaaccttgtgtggtcagtattgttatcttcatttttcagatgatgaaactgagtccccaaggagttcactaagttgactaagacagtccagcatctcaagggtccaaacactgtgccagtttcttatttctcaaaagttatctcctcacccctgccctgccctacccttgtgccatcaaaatgcacactccgcttgggttccaattgtctcagagatttgggggaaggaatcatagcccatgcccctcatcttacttcacctgctcctgtgatatgtggcccccatgctgtcccttccaaatctatcatgaaagtattttttctctgtaccaaagctgttatctttggagtccttgatttattcagcagcatttgttgagtgcctgctgggtgctaggcactgagttaggcattggggatagggtggtgagaaaaacagagatagtcctcatgaagcctaaggagtcctccttgtcatcatcccataaactgacctctgttgctgaaagtcaacaagtcacccattgaaacataagccaacaatcagaaagaacaaatgccattgtaattaaatatatatatatagtgatttaacaaatagataaagacttctgtttaacaccttcacttcaaatatgatgactttgagggcttaacaacaaccacaaaattctaatactcattcattgatacataatatttaacatatttgttggatacgtatgatattgttatatatatagaatgtgtaatgatcaagtcaaatatttcaggtatcccgtcactttgaatatttatcatttctatgtgttaggaacaattcaaatactctcttcttgctactttgaaatacacaatacattgttgttaactatagtcactctgaatattcttttttttttttttaagttctggggtacgtgtgcagttttgctacataggtatacatgtgccatggtggtttgctgcactcataaacccgtcacctacattagatatttctcctaatgttatctctcccctagcccccgaccccccgacagaccctggtatgtgatgttcccctccctatgtccacgtgttctcattgttcaactcccacttatgagtgtgaacatgcggtgtttggttttctgttcttgtgatagtttgctgagaatgatggtttccagcttcatccatgtccctgcaaaggacatgaactcatccttttttatggctgcatagtattccatggtgtatatgtgccacattttctttatccagtctattattgatggacatttgggttggttccaactttttgctattgtgaatagtgccacagtaaatatatgtgtgtatgtgtccttatagtataatgatttataatcctttggatgtatacccagtaatgggatcgctgggtcaaatggtatttctagatctagatctttgaggaatcactacactgtcttccacaatggttgaactaatttacactcccaccaacagtgtaaaagcgttcctatttctctacatcctctccagcatctgttgtttcctgactttttaatgatcaccattctaactggcgtgagatggtatctcattgtggttttgatttgcctttctctaatgaccagtgatgataagcatttttttcatatgtctgttggctgcataaatgtcttcttttgagaagtgtctgttaatatcctttgcccactttttgtttgtttttttcctgtaaacttaagttctttgtagattctggatataagccctttgtcagatggatagagtgcaaaaattttctcccattctgtaggttgcctgttcactctgatggtagtttcttttgctgtgcagaagctctttagtttaattagatcccatttgtcaattttggcttttgttacctttgctttggtgttttagacatgaagtctttgcccatgcttatgtcctgaatggtattgctcaggttttcttctaggattttcatggtcctaggtcttacatttaagtttctgatccaccttgagctgatttttgtataaggtgtaaggaagaggtccagtttcagttttctgcatatggctagccatttttcccaacaacatttattaaataagcaatggggaaaagattccctatttgtgtcaggtttgtcaaagatcagatggttgtagttgtgtggtattatttctgaaggctctgttctgttccattggtctatatatctgttttggtaccagtatcatgctgttttggttactgtagccttgtagtatagtttgaagtcaggtagcatgatgcctccagctttgtttttcttgcctaggattgtcttggctattgcgggctcttttttggctccatatgaagtttaaagtagttttttccaattctgtgagcaaagtcagtggtagcttgatggggatagcattgaatctataaattactttgggcagtatggccattttcatgatattgattcttcctatccatgagcatggaatgtttttccatttgtttgtgtcctctcttttgtccttgagcagtggtttgtagttctccttgaagaggtccttcacatcccttttaagttgtattcctaggtattttattctcttactagtaattgtgaatgggagttcactcatgatttggctctctgtttgtctgttattggcgtataggaatgcttgtgatttttgcacattgattttgtatcctgagactttgctgaagttgcttatcagcttaaggagattttgggctgagtggttttctaagtatacaatcatgtcatctacaaatagagacaatttgacttcctctcttcctatttgaataccctttatttctttctcttgtctgattgccctggctagaacttccaacactatgttgaataggagtggagagagaaagcatccttgtcctgtgccggttttcaaagggaatgcttccagtttttgcccattcagtatgatattggctgtgggtttgtcataaatagctcttattattttgagatatgttccattaatacctagtttattgagagtttttagcatgaaggggtgttgaattttattgaaggccttttctgtatctattgagataatcttgtgttttttgtcattggttctgtttatgtgatggattacgtttattgatttgcatatgttgaaccagccttgcatcccagggatgaagctgacttgatcgtggtggataagctttttgatgtgctgctggatttggtttaccagtattttattgaggattttcatatcgatgttcatcagagatattggcctgaaattttctttttttgttctgtctctgtgaggttttggtatcaggatgatgctggcctcataaaatgaattagggaggattccttctttttctattgttgggaataatttcagaaggaatggtaccagctcctctttgtacctctggtagaattcagctgtgaatccgtctggtcctgaacattttttggttgataggctattaattactgcttcaacttcagaacttgttattggtttattcagggattcagcttcttcatggtttcgacttgggagggtttatgtgtccaggaatttatccatttcttctagattttctagcttatttgcatagaggtgtttatagtgttctctgatggtagtttgtatttctgtgggatcagtagtgatatcccctatatcattttttattgcatctattgattctactctcttttctttattagtctggctagcagtctatctattttgttgatcttttcaaaaaaacagctcctggattcattgatttttttgaagggtttttcatgtctctatctccttcagttctgctttgatcttagttatttcttgtcttctgctagcttttgaatttgtttgctgttgcttctctagttcttttcattttgatgttagggtgtcaattttagatctttcctgctttctcttgtgggcatttagtgctataaatttccctctatacactgctttaaatgtgtcccagtgattctggtatgttgtgtcttcgttctcattggtttcaaagaacatctttatttctgccttcatttcgttatttacccagtagtcattcaggagcacgttgttcagtttccatgtagttgtgcagttttgagtgagtttcctaattgtgagttctagtttgattgcactgtggtctgagagacagtttgctatgatttctattattttgcatttgctgaggagtgttttacttccaattatatggtcaattttagagtaagtgtgatgaggtgctgagaagaatgtatattctgttgatttggggtggagacttctgtagatgtctgttaggtctgcttggttcagagctgagttcaagtcctgaatatccttgttaattttctatctcattgatctgtctaatattggcagtggggtgttaaagtctcccgctattactgtgtgggagtctaagtctctttgtggtctctaagaacttgctttatgaatctgagtgctcctgtattgggtgcacatatatttaggatagttagctcttcttgctgcattgatccctttaccattctgtaatgcccttctttgtctcttttgatctttgttggtttaaagtctgttttatcagagattaggattgcaactcctgcttttttttttttttttttttttttttttttttttgctttccatttgtttggtaaatattcctccatccctttattttgagcctatgtgtgtctttgcatgttagatgggtctcctgaatacagcacactgatgggtcttgaccatttatccaatttgtcagtctgtgtcttttaattggggcatttagcccatttacatttaagtttaatattattatgtgtcaatttgatcctgtcattatgatgctagctggttgtttttcccgttagttgatgcagtttcttcatagtgtcgatattctttaccatttggcatatttttgcggtggctgataccagttgttcctttccatgtttagtgcttctttcaggagctcttgtaaggcatgcctgttggtgacaaaatctctcagcatttgcttgtctgtaaaggattttatttctccttcacttatgaagcttagtttggctggatatgaaattctgggttgaaaattcttttctttaagaatgttaaatattggcccccactctcttctggcttatagggtttctgcagagagatctgctattagtctgatgggcttccctttgtgggtaacatgacctttctctctggctgcccttaacattttttccttcattttaaccttggtgaatctgacaattaatgtgtcttggggttgctcttctcgaggagtatctttgtggtgttctctgtatttcctgaatttgaatgttggcctgtcttgctaggttggagaagttctcctggataatatcctgaaaagtgttttccaacttggttccattctccccgtcactttcaggtacacccatcaaacatagatttggtcttttcacatagtcccatatttcttggaggctttgtttgttcctttttattctttttttctctaatcttgcctgctctctttatttcattaagttgatctttaatcacggatatcctttcttccacttgatcaatttggctattgaaacttgtgaatgcttcaggaagttctcgtactgtatttttcagctccatcaggtcatttatgttcttctctacactggttattctagtcagcaattcatctaaccttttttcaaggttcttagcttccttgcattgggttagaacatgctcctttagctcagaggagtttgttattacccgccttctgaagcctacttctgtcaattcatcaaacttattctctgtccagttttgttcccttgctggtgaggagttgcgatcctttgtaggataagcggcattctgatttttggaattttcaaactttttttgctggcttatccacatctttatggatttatctacctttggtctttgatgttggtgaccttctgatggggtctttgagtggacgtgctattcctttctgtttgttagttttccttctgacagccaggcccctgtgctgccagtctgctggagtttgctggaggtccactcctgaccctgtttgcctgggtatcaccagtggagactgcagaacacaaagattgttgcctgatctttcctctggaagcttcatcctagaggggcacctgccagatgccagccagagctctcctgtatgagatgtctgttggttcctactgggaggtgtctcccagtcagaatacacgggggtcagggacccacttgaggaggcagtctgacccttagcagaacttgaatgctgtgctgggaggtccactgctctcttcagagccatcaggcagggccttttaagtctgctgaagctgcaaccatagctacccctttccccaggtgctctgtcccaggaagatggggtttttatctataagtccctgactggggctgctgcctttttttcagagatgtcctgcccagagaagagaaatctggcagtctggccacagcagccttgctcagctgcagtgggccccacccagtttgaacttcccagtggctttgtttacactgtgaccataaaactgtctactcaagcctcaggaatggcggacgccccttcctccaccaagctcgagcgtcccaggtccatctcagactgctgctgtgctggcagcgagaatttcaagccagtggatcttagtttgctgggctccgtgggggtgggacctgccgagccagaccacttggctccctggcttcagcacccctttccggggggtgaacggttctgtctcgctgctgttccaggcaccaccggggtatggaagaaaagaactcctgcagctagttcagtatctgcccaaatggccacccggttttgtgcttgaaacccagggccctggttgggtaggcaccagaggaagtctcctggtttgtgggttgtgaaaaccgtgggacaagtgcagtatctgtgccggagttcctcaggctcagtccctcatggctccccttgtgtaggggagaaaattccctgaccccttgctcttcctgggtgaggtgacgctccatcctgctttggcttgctctctgtgggctgcacccactgtccaaccagtcccaatgagatgaaccaggtacctcagttggaaatgcagaaatcacctgctttctgtatcaatctcactgggagctgtagaccagagctgttcctattcagccatcttgccagcctcccctaaatattctttaaatttggttaaagattgcatttgtggctctaaaagtgactttgagagagggttactttgcttctttatgagtgaatccttatacagagaacacagactcacaaaatacaaacacaacaaaagcaaattttaatgctgtctttgcacctccctagacttagtggcgagggaatgggcttcctagtaccagggaaagtaagaattacagctctcacctctccaaagaaggccgaggagaagggggtggggctacctgctctggccccaacagcgggttccagcacaacagcattggcacacactagatgtcagaaaacacagagcctctctttgatgagatagctgattcggtgaaagtggcaaggaactcagggactcaattgcctgtacaaaagtaacccaccaatccttaaaaattatattaccaaaaactgctccctggaatgctgtggcccagccagctgcccagctcactctcttgtctccttcaggtctctgatcagcggtccctttccagggagccctgccctgatcgtcttatcaggcacttcattcctcctcccaccctgagcgaggctctttctctctctccccaacttagtgtttttccattgcagttattgccacctgccatgctattttacttattaacttgtgtgctatctgtcaccttccactgaactataagatctacagggcaggattttaatctatctcccttcagagtatccctggcagcaactatgaacaggacagagcaggcacatgaatatttagggacagaattttaagcacagcatttgcactaaaatttaagctgctaatttataatactattcattgccttgttttatttttaatttaagtccttcaggcatcaactagtttaggtaacactctgccaatcaaaggaaaaaagtctcaaaacaaaaggatatttgtctgagaagagcagatcaataccatgcaagcaagtatcttttaatagtcttttatattcataatcacctgtttttaaactatttttgtgatctctacattaacaataaatatttagtggcatttaatgggttctgagccacgttagaacctaaaagggcttttgacacacttttctaaaaataaaatgctattgcaagcttgttctcaggaattctctttgagttcataggaaaacctgctctcattacactaacctaagcttaatcagtccccttataagatgttaggatttttaaaactgccattcactattataaataatggagtagaaacagtttcttgcataaaactttttctcatttggtattgttcactaggacaggttcctagaagtataatcacaaatgcaaaggatatggacattttttatggttctaatatgtattgccaagatgatcccccatccccacacacacacacacaaaacctgcactcaacaaaatggaatatgggcattccatcatggaagtcatggccactgatgtgaagggaaacagacatatgagatcaggactgggaatcacaagatttgagcaggttaaatcgatagatcaaatttagcaagatgaaagctaatggaggaagagagaaacacagaaaaccacctacttggatccaaataaccaattgcacgagtacaagatgagagatttggatttatggcagcacatgaaacaaacaacaataacaagaaaaatactctagaactttcagttgccattaagtaagttaagaatgaatcatccatgagataggaccacagaaaactcatgaggtcttaggatgtatcataggagcatagtggccagaacacaggattttgattttcttatgagattcttatgccattctgagagagcccacaatattccctttctttctctatatagtataactttcagtgaatgaatattgaaatataaaatatacagtgttttctttctttcattcatttgttcattcaagtatttccatatcattcatagtacccagttctttttcttcagagtagttattgaaatttataattatttgtaggattatttgtttaatattactctgttctaccaaactgtagggcaaaatcatgtctatttaattcactgttgtatttctaaccactagcactgtgagtgttacatagtggacactcagtaaatatagtaagtatttgctgacatgaattaatgaatgcactaatgaccagctatgcaaaatgcaacatactaggctctgtgatatggagatgaataaataagacatggtatgttagtctgttttcacactgctataaagatactacctgagactgggtagtttataaacaaagaggtttaattgactcacagttctgcatagctggggaggcctcaggaaacttacaatcatggtagaaggcaaagggggagcagtcaccttcttcataaggtggctggagagagagagcaagacaacaaagtgccacactttaaaaccatcagctctcgtgagacctgactcacttatcacgagaacagcatggagaaaaccgcccccatgatccaatcacctcccaccaggtccctcccctacacatggggattaaaatttgagatgagatttgggtagggacacagagccaaaccatatcatggcccctggtattaggaggtcaaagtctacagaagaacttcccagttcagtattttatgtacactggtggatcacagataggttgaaggagaacccagatgtgtatttccctagatattagggtggcctcctctgtttaccctagggaaatattaccattttctatatgtgacatggagtcaagagacctgttagaaagaaccatattgcagcctgctagatgctaaaattgctgcatctgtgcaaataagaaaacaatcatttgcagaaagtgggtagtgagtgctgatttgggagcacagaaaggacatttacagagacaataacctttgagctatctcttagagtcgttgaaatttcaactggacaaggagtgaagagtgtgtgtgaagaccactctatttttgcctcacacctctattttaaaatttgccatattttaatgttttactatatcttctttaacaagcacctagagcctcacaagggcctagtaaaagttttttttttttaataagaaatgaaccaggggataaatgacattctgtcccttccccttcccttgaggagctcacttggtgtaaaatgcctctgcagagctataatgcacaaacaacacattttaaaagcgatgtcaacacctcttgcttaacacttagttttcttgcttaaaattgccgtgtgaaaagtcatttgtaagaagcacaagaagcaatgtgcactgtgagtgcctggaatggacattgggtcctcacacttctgcagccctggtctctagtgcctgctgccagaaaagatgaaaaatcattttccttcccagcaagaaagcctgagtctgggaaccagaggtattattaagacttaagcatcactcctctcaacagagcacacttgtgttttgtgttataaaatacagaaaaggataaatacagagaaagataaaaaagaaataaaaatatgtcattttataatctagagataatcattaacatttgggtatatttccttccaggttatatattatatagaaaacacacctatgtgtgtatatatatatatacacacacacctatatatataatttttgaacagaatattggaaccattctctatatagggttttatatcctgttttatttttatgggaacattatattgtgaacatatttcaatgaaattaaatgttccacatgatttttaatggctttgtaatactccatcatactgttgaattataatttattcgaagattcctctattattggcaagataggtggttctaattttcttttctttacttttatataaaacactgcagtgaacaccgtaacacataaatctttgcacctgtatttgcttatgataaaagcaaagttttatgcatctgtatttgcttatgataaatgaaattatagggtcaaagtaaagtttctctctctgtacatactcacatgtatgtatgcacacatgtatatgtatatatgagctctatttctggaggcagccgtttgggttttgacagtgtcagtggtgggcacacaggttagcatcacagtagaaagtattcctattttcaggctgctctaactactcagaaaggaccatgcatctagcttagctttgctatttaaaatatacagcgagtatgtggaaagactttgggttttggaatcattagatcattggactaggagtcaaattctgccctactagctaagtcaagaagtctctgaatttatctgaaacttacttagtcccttcatctacaaaataaaaatgatcaaaataaaataatgtatgtaaaatgcccaacacagtgcctggacataagggaccctcaatcaatgcctcctacttctgagccagcagcctagggtgcattttccacatttctgtttacagtgaatcataaactccattcctctgtagatttgggcatttgtggaccactaaggagcacatctgaatcttgtcaaaggtgtaactactagctatctttccaactccacaggtgaggagagagacagtcttctctagttcattctatctttattgtaataggattgggatcgctgtaaaataaaatgaaaaatttatgctatggatacatgatgcgcaaacaaaatctgttcaatgtgggtggttggctgggctctcaattgctggttttatgaactacttccatatagcagcttcaccaaaaatggaatttaaattataccttggcaaaaggctccgcaccagaggtatgaatggatagcggaaaccacactagatactattctagttgcttcgtatactttaactttcttcctcttggctggaagttccatgagagcagagacatctttctttcacaacaacacacacagtgctgggtgccatgctgaacacataatcaaagctgagtaaatattagtcacataaataaatgtattaacccctcttcaactcagattccactgcctgcccacatacacacccatgaagtaggcactcttattattattcccattcacaggaaagttaacactgagggaatcagagcattgatcgatggcacagagccagtaagtggcagtgaacaaagactaagccaccaaaggcctgtgtcattttctctattctgcatctcttacagctctggggagagatgtatgggagagacaagacagaaatttactgctaaacccctaaaatcctttctgggttattccaggggtcataccaggtttacagcttcacagatccaccaggtctcttccaggcctttgaaatgccatctcttctgtctttcctgacattcacattttcctttcatcccatttggaatctgtgcaccctgcctcctctctgagatctcaaacacttggcacatccctttgttctagttcttcgctcactgtgttaccctgatgagttaaattcccattcccctacaagattctgcaaagaggcagacaactgggccatgtctgtctctgtattcctgtggccacccctgtactcccctggcctcaccaaggcctggcacactggccaggtgataagtgctttccaaattgatggatatctgctgctggaattgctggccttacccacttgtttgcaaacgttaattggtctcctactttcttgcatggaactagcattgtttccacatctattttctaaaggtctagaaatcattttcaaatacatgatagacttctttaatagacaatacataacttttatgcaaaaaagaactttttcatgtatctattaagtagttttttaaaaagccaataagttcctgtggccttgcaatcctctcatctttaaaatgagagtgatgagcctccattccagatctaactactttatgggatagctcttaattctggttttgcaaacacttaaagccgttgtgtttgttttttaaaacaggtaaaatctaaagagtaaatgggtcatagtttactgaaacagtatcctattgtaggatatttagagaatttttaatactataaataatttagcagtatacattcgtataaagaaaaccctcttatttcatttatgagtatataaatgacactgtcgtgtgtaaggcatgttctaggctctgaggatatagctgacataacagacaaaaatccctacccctttggacattatacttctatattttagatcatttccatgagatacagtcccatgtttctggatcaaagagtttttaggctcttgatacacattgctgtatcattttctttcttttttttttttttgagatggcatcttgctggatgcagtggcatgatctcagctcactgcaacttccacctcccgtgttcaagcaattctcctgcctcagcctcctgagtagctgggactacaggcacccgccatcacacctggctaacttttgtatatttagtagagatgggggtttcgccatgttggccaagctggttttgaactcctgacctcaggtgatctgcccacctcagcctcccaaagtgctgggattacaggtgtgagccaccgcgcctggcctgctatatcactttctatcacacctgaccaagtaggagtttgagtaggaatctgactcagagcttgcttttagagagtatataacctttgccaagttactttgtcttggtttttcccttggacacaaactttctctccagttggcccccagctggtaccttatgtcctatagtcctttgtgttcaggaggactgggtgttggctggaggaagtaagtttggctggaggaagtaagttcccatccttctaccaggtggttactaaacagatcttgcaaatcctgttctcataaaattacctctttggaataaagttcaataccttagatttttgccctgacaaattaattattcaacatggttcatctctctagcattccaaggtttttctatgttagacatcttttatccgccatggttgatcactgtcttcacagcattatgtcatctgcagagtgaacaggtctgtctccctaggcatggatatatgcctcaaaaactctatttcctcatccctctacctgggatgctctcaggtagccacaaaactccctccctcacttctttccggtttctgctcaaatgtcacttttatcagagtccatttctgaccatattttataaagcaataccctcatcattctaaaccccatttgccttcctttattttattcatctgacttatcagccccagacatgttatatgcttgattgcttattagctattacccctactgcaatgtgaactccacaagggtattgctttgttcagcactgcatctgttcagcactataatagggcctggcacataataggtgtttaatatatagctgccaatttattgggtgtgcttttttgaaatcagcctaagaaacaagttgttttttcatcatgaaatgacactgacttatggtattgataaggattctggcccccaccctcagcccattttccccccaaagtcagctgacaccctcaggacttcttcacatggaccaatatgaagatacatgtgcatcacatgcacagccacacaccccctggcccctccaaaacagcttgtacttatgtggctgcctttctgggccctagcattgggttttacctgaatcccaattttaccattttagtgacaacatagccactccacccctcattaactatataagcttggccacttaatttaaacttgctgagtttgtttccttgcctgtcaaaattggagtaatactaagtcgaagagttgtataagaacttctaatgtctactgtgacatgtgaagagcttagaaatcatcactcctgtcctcatatgaaaaaaagctgaaaaactgaaaatcaacaactctaattacttccatcagagaactgaggtcatgaggcaaaccttcgccacctccttcctcctccaccccccaagaaatggagagacaagtgaatactgaaaatcacagattctcaggagctgctggaaacagtaaatggtaggaggacttaaaggctaactgatgactagctacaggctgagtgtagactgcttggagagttaaactcctgggagcccaatcctgaagggactcccacacttttgtgaattttaaccccaggagccctcatcaggttctcacggtgaaaatcagagaaatctcctccagcttgaggcatgggaagggaaaaagaacctttttgaaatctggccagatgcttctccctaacaaggtctgccctcaaggaaactactttaccagagtcttatctgatccgaagaaagaacaattagccaggtccagccctgtctagccttcctgtctcatataaaggaagtaaaaaaaggctaagaaacttttctgaagaccacacacaaagattctgccccaataaaatattgagatttaatcaaaagatagaccgttaccctttcccaatatgttaccattacatcaacaaggctcagtataacaacagtggattacaacagagagggctgcaaggcataacctctacttaagaaggagtttctagggaaaaccaaagacaaaaatgagaagaaagaatgacaaacaaacataataaccaagaactgcaggaaaattacaaaagatgtaacatacgtataatgggaatatcagacaaatagagaaaagaatagaagaaatatttgaagattagatgaaataataaaagggctattatggtaagtagttggttcatactaagtgatcaataaatggtagtcataattactattattaattgatcaacatatcagaggagggaagaagagttgaatcaaaggcaactgtttaaacaggacttagtcatgatcaggcacaggagggaggacatctttcttgacatggggaaaacaagcaaaactggtaaaaatatacaacaatttgatgaacaagaaggaaagtgagagtagataggattacacaggatgccctccatataattctgactttaatagtaatatcttccttatagaattactgagaaaattaaataatttataacaatggttttcaactggtaatgaacatcagaatctcctggatacttgtttgtaattcatctctctgggccccaagtcagagaatctgattctgtgcacctaagggggtgaggaactggggctgcggaccctgcatcttttataagcatcttatgtgaatctgacacaagtgccccaaagagcaccttaagaaacacataagcatgttgattagtgactgacctgaaacacagtcaacaaatgtttttcaagtagacagaggcaagctgatctgcagagggaaaggacagggctgaagactggggagatggagcaagtgcaggaggaatgtggtagggagtccatgagagatggatggaaggatcgtgtagcagcagagacccagtttagaaaacacatattcctagaggagactttgagattggatttgtaactttcttcatcaactcccaagagcctggtggcaggagccaagcagacagatggtacagttttcccagaactggaaaaccccaaacacagtagaagatagggggcacaggcatccaccaaggggagagagaatcagggaaccagggcactgttgagaaagctggtcaggggttcaagttggccaggaagatagtacctctactatctacctataatttttttaaaaaaccccaaagtcctaggaccccacatctcctccaaccactacctcatttctctgccccacctcgacagccaagcacttcaagagagttgtgcctacacatgttttacccacttctctgctgttgttcacttctcgacccccaccaaaatggctcttgagtcttgacagtttctgcaatggcctccgcgttgtccgtgcacactccatcatcttgcacacattcctcagtatcgcagagggagctgaccactccctgattcctagaatattctcttctcatgtctttctggttttatgtattttgccccaaaaagtggcagcaggggagttcccacacaagaaagtgcaacacactatcctgaagtggggctggttgggattccaaagaaaggagcactaagcaccagtgagatcagtccaaaacatttattaggggaacttacttacagaagtgctgcagtgatccctgcaccgaacagcgagagaaaagggatgttctgcccaggcacaaatgcagtgaggggtccagggtatggagtttttatgagggtttaaggagtttggctcagggatggggccagtttctttcagtgttttaggcaacaatctagatacctttgtcagtgtctgggaatgttcaaggccccagtttgggattaagcctgctgggaataacccacatttggctgggtcacagagtggtcaaggcactctgtgattttctatcaagacacagaaagaaagcgggagagctgaagggacctacataagcactattggcatttgggccatatttgaggtttacaacataatgttatgtatagatagtatacataatgatatatatatagatagtaaaatggttactgcagtgaagtaggttaacatccatcattgcacatagttactttttttgtgacaagggcaactaaaatctacttaaccaaaatccgtaatacaatttttcatcctcatgctatacattagatctctagacttgttcatcctatataactgttattttgtatcctttgacttacatcttcctattttttccttctctaccccctttgataatcactcccttatctatctctgcatatttgagctctttttttaaaaaaatgtttcacatataagagagatcatgcaatatttttctttctctttctggcttacttcacttagcataatgtcttccaggtccatctttgttgtggagaatggcaagatctctttctgttctaggctgaataatattccattacacacacagacacacacacacacatacacacacacacacgtgtacatgttctttccccatttgtacatttcctacattttcttttcccaaatgaacatggacatttaggtcgtttccatatcctggctattgttaataatgttgcaatgaacatgggtccacaggtgtctttatgaggtagtgagtttatctcctctaggtaaatacccagaagtcggattgctgtatcatatgatagtttatttttagttgaggaacctccataccattttccaccatggctataccaatctacgtttccatcaacagcatacagggttaccttttctccagacccttaccaacatttgctatctcttgtctttttgataatagctatccttatggatgtgagataatatcttatagtggttttaatttgcatttccctgatgattaatgatgttgaacaccttttcatatacctgttggccatttttatattgtctttggaaaaaatgtctgttcaggttatttgcccattttttagttgggtttttttgtttttctgctattgagttttaacagttatttacaaattttagatattaactccttatcagatatgtgaaatgcagttttttgtttgtttgttttttcagttcgtagttttccttttctttctttcttttttctgtgtgagacagggtctcactctgtcacccaggctggagtgcagtggcataataatagctcactgcagccccaaactcctgggctcaagtgatcctcctgcctgggtctcctgagtagttgggactacaggtgcatgccactatgtctggatgatttaaaaaaaatttttttagagatggagtctcactgtgttgcccaggctatgccttttcattttgttgtttgtttcctttgctgtgaagaaggtttttagtttcatgtagttccatttatttattttatttttgtagcatgaactgttggtgtgatatccaaaaaaattattacaaaggccaatgttgaggaggttttctgctattttctcttctaggagatttatgatttctgagccagataattctttgttgttggcagctgccctgtgtcctctgggatggttggcagcacccctggcccctggccccaccagttgtgataaccaaaaatgtttccagatattgtctgattctgatgtcccctagagaacaagatcatccccattgagatctgcttctctaaatgatgcactctccaaactctgtcctgtaaccttttctgtcctttctctgcacaattagactcatccgttccatggctttgagtaccatctgcgtgataatgactcccattcatgctccacgttgagatttgtggcccactttgatgttctagaccctgggctaaattaaggtaaattaagcctggggcttttcaaattagacagagggaatgtaagcccctgttctactcttgctgtgtaactttaactcttttaacctttgtttctctgtctgaaaaacaaataataaagatgtcaaagctgtaaagatgatcattagagtccttggcacatagtaagttgctaagtattattataacattcataattctgatctcaatgccttcaggctatgcacaaagggcttctggacttagggtcattcaatagaatgttatagactgttgaaagttcaactctagagcctgagagacctgggttcaaatcctgaatctacaattctgctctatgacctctctaaggctcggtttcttcctgcttggaaaaggggaataataatattacccactttggagggtgaatcaaatgagatcatcctaggaaaatcaattaacatgatgtctaacataccagtacttaataaacattagtaattattattagggtaacattagagaagctgatctttaactgaatctcaagggctatagaaagagcagtctcggcagagcatgaataatgggacagggtaaggaaaagtgagctataatctgggaatgacaaggagttctggattgctagtgcaaggttagggcttgagatgaaactaatgaattgtcatctaaatgcccttccacgccagtttgggactatgggctttatccttttagtacctgctagcagaaattgttttttggttttttttggcaaggggagagggacaccaaagagttttagattaggcaacaacatgatgattaaattttcaacttaggaagagagctctcatcaatatggaagagcttggagaagataagaacagaggcaggaaggctgggtaggagattgtggcatgaactccagtgagagatcaggaaggctgctcatcaggagatgaatgccacagacatcaaagagctaacaactgatgagttgaatgcagggggctgagtaggactctgaggctttttgcttggtcgcacgtggtggaccggtggtccattgaaccctctgctgtctcctcatcccaccactgccctctcctctctcctcttccctccttagctaagctcatcatctcagtaacacttctgccatagcccataacttctttgcctcttgtcctcacaccaatctagcaaaactccagccctgaatgaacacatcttttctcttctttgtgcttacacctgagccctgcacctggaaaaagtcacatttcagtgcagattggccagttcacatcatgctaatttcctagagctgctgtaacaaattgccacacatttggtggcttaaaacaacagaaatttaattatcttacaattctggggtccagaaattcaaaattcatctcactgggccaaaattaaggtgtcaacaggaccacactccctctgggggctctagggcagtggtcccaaacctttttggcaccagggactagtttcctggagaacagtttttccatgggctgcagtagggggaatggtttcaggataaaactgttctacctcagatcatcaggcattagattctcataaggagtacacaacctagatcccttgcatgtgcagttcaccatagggtttgcacttttatgagaattgaatgccgccacttacttgacaggaggtgtattagggttttctagagggacagaactgataggagatatatatgtgaatttattaagaattaactcacacaatcacagggtcccacaatcagctgtctgcaagctgaggagcaaggagagccagtccaagtcccaaaactgaagaacttggagtctgatgttcaaggataggaagaatccagcatgggagaaagatgtagtctgggaggctaggccagtctctccttttcacattttctgcctgctttatattcattgacagctaattagatggtgcccacacagctgattagatggtgcccacccagattaagggtgggtctgccttccccagtccactgactcaaatgttaatctcctttcgcaacaccctcacagacacacccagggtcaatactttgcatccttcaatccaatcaagttgacactcagtattaaccatcacaggaggtgaagctcaggcggtaatgctggctcaccccgatctcctgctgtgtggcccagctcctaacaggccacagactgggggctggggactcctgctctagggacgatttgttccttgcctcttgcggcttctggtgactgtcagcaggcttgtgtgtggctgcatcactctactctctgcctccatcctcacgtggccttctccttgtctctgtctcaaagctccctctgccactctcttttaaggatacatatgattgcatttaaggcttccagatagtctagaataaacatctcctctcaagatccttaaataaatcatatcttttgccatataaggtactattcacactttctggggattagaagtgaacatgcagtagtccctttgtatctgcaggttctgcatccactgattcagccaaaaatattggaaaaataaaaattaaaaattaatacagattttaaaaatacagtataacaactatttacaaagtattacatcacattagatattataagtaatctggagatgctttaaagtatacagaaggagtatatgggaggagtagctgtggattttgatattcacaggatgatgctggaaccaacccccgacaaataccaaggaatgattgtatttcgcggggacatttttcttcctaccatttacacttatgcaggaccactgaccttggagggcccttgacctgcctggcaatctgaccaaattactctggaaggcttgtcctcccactttccctaatgctgattcctttcattcctgacccacctatgggtcacatcacttttcccacatcattctcaacaagtgaccttgttgtgttctctatggggggaaaagaaaagaaagaaaaagaaatccctggacctggaccagaatttcttaacttgttgctaaagttaataaacctacctgcatctttcctcacttcttctcctactaaaataatggatctctccatccctgtcctgagaccatctctactcaggctctggataccactctctcctgcttcctcaggaaccttaaatggccaatcaccccacctttgttttgtagagtcagccttttcttcttgataaggtccttcccttcagctcaagttttaaaactcttccttcaggaattttccttcttaaaagaacaatttaaaaaccttacaacaaacaaaattccaccccctggccaatccatcactaagtcctgctgatggtaccttgtaagtctttctaattcaccaacttctccccttctcagcctgctatgagtccagtctgtcatcacatactcctggacgaccatagtaacctttctgcatccatttttggcacctcacaattgctctgttaagctgccttcagttgtgtgtgattggtatgtgagctccatgaggtcagggacttagttccattcatgtgttccctgtgtcctcatcatcttgaaaagggccagaaacacagtagctgttcaataaatgtttgttgaaggtattcacataatttatcactaatttcaggaggaagacaaagttccttaacagcccaaaaggcccagaaaggcctgacccctactcatctctccacctcatcttgtgtcatcttcccttgttccctgagctctagacacattggtcttctatgaacgctcccagttttctcctgccccagggtatgtgtagagaaatgtttcctcattgtttagaacattcccctctgccccaacccaacttttcctaataaataccactcagccttcagatctcagctcatatatagcaagttgcttccttggaaaatctttccttagcaccattatatgctctgttatgttctcgttgcacatatatctgtcatagaaatttcccagtaagaactgtgttcatatttggtgactatttgattcatgtctgtcttagtccattcagactgctataacaaaatatcttagactcagtgatttacaaacaacagaatttattgcttacaattctggaggctgagcagtccaagatcaaggcaccagcagatttgttgtctggtaagggcctgttccccatacatggcaccttcttgctgcatcttcatgtggaggaagggtaagagagctcactcaggtctcttttataaggacactaattccatttatgagggtggagccctcatcacttaatcacttcccaaaggttccaccacttaatactatcacattggctattagattcaacataagaacttgatggagggggctgtcaacattcagactgtatcaatgtctgtctttcccatcaaatgaggacaggggccactatattcccagtgcttagcatactgtctgacacacagagatgctcaataggtatgcactgcaggaacaaatgaagggataatggaataatggcaaggctgagatcagttgcaggaggagaaggtttagtggaagggtcacaactcagttttgcccatgttggagggccccacagctaattcagctggagaggtacactcttgtttgggaatctgggctgggagctaaggacagagggcaggctggatatctagacttaggtggttggcaaccctgtagtagatgcaaaagatgggccatataagaggattcatgtctagagatgagagggggatgggattaagggcagactgggagctcagaaaggaagacccacagattaaaaaaagatgagctaagtgtagagatgtaaaggagggacgaggttgaggggcacgtgaagcagcaggtgaggccaagtgaaggtgaaggacagactgggggtaaaatgagggattggggagaatcaggaaggtttagattttctgagaggaaaaaaatctcctgctggcctaggccaagcaggtgacctgcatgagtggagtgtgtttacctgtgtgcatgcttatacgtgtgtcatagggaacaccacaccactctcaatgtgacttcacttctcaatagattgcctggcatctttttacagcaacccaaactctctgaggcaagtaaggcaggtgtaatgatctttcttttctaggtgcaatattaagttggactcatatcctaggccaatgctctttccaccaaaccacactatttcactgggctctagccagcttgtccggagcttgaagacatattactgtcttatttcagcatttctgtctactgcagatgaaattggcctccagccagagaaaaataaaatgcccttgataaacggcaatatagtaggatcatagctttaggaaattgtgatgctccttgtaacattccccgctttttttctttaatggggagtccttaagaatcaattacattttcctaattagtgtgggtagtcaggacagaccagaaccaaaatattattaatggaatgtgcctcctatcctcggcagctgagtttgggtagcacatgcaaccccaaggaagagctcagccctctccactctgtgggtttgaattcagctacagaagctcagaagaaagagcactggactctactgaaaaccatgtttctacatgagttttcattcttcattcaaattttagcaaattttaggctttgtgacttctaggcatggcccactattgtgttggacaatttttcaggtaaccatataacaaggtactgcggttcttattcttagaatctaaggaaagctatgtactgtgtcatcagaaaaatgcactcacacacacaattttgcttgtatttcagggatttctccaaccttctgaggcctgtccatggctgactccccctatagtttagggggccttcagtccactcatgagtggattcctactgcagcctcccaataggtctctcctctttgctctctgactttccattcctctgctaaattaagaatttcctattgttctcaagtcagcccaaattcttctacatggcttatgaggcccttcatgatctggcaactagctcacatttccccactgtaggcacgtagagggaggggagtgagggaggtttgaggagaatgtaactcagtgaggatctgatggacaaataaaagttagagagtggatgaggatggaagaggaggagtgttgcttggagaggcctggaggtgagagggaaccctaaagaacaagaaaggaatatgacatgggctttggaatacaacatctcagatttgattcctggctctcctgcttattaaccaggtgaccttgcacaattcttcaaacctcagtttccctgtgtgtaaaatggcagtaatagtagcctcctcaaaggaagggtgtgagggctgcaatgcataatgtgtggaaagtgcttagcagagtcctggcaggtaaacagtggatgggtgggctgcagtgagataccaactcttgggatgggatgcctagccatgaaggccatgtaggtcataggagggagttcgttgacactttatctcctctttaccagttgggacttgctggccagccttccagaggtctaacactgaatgctgccagcctctcctgctggcttcagggcctccttgtgtcaaaagtgattgcagctccagacaactgagccccactgacagacacctcccatcctaacacccaccctaacctttcaccaaaggccacaggaccaagatgggaaggctgagactgtgccacagcagggcttcctatgaccccaaatgggggtcagcttttgactctggtgagatacattggagaaccagattaacaccagattcctcatagagcaacttagttatgccaagcatattctcagtggcgacgtgcaaaccgcatttatcctatgtggtagggaatgagacttttctccataaatgcatcatcacatactgcagccttctaagtgttaaccattttgtccaccgatttggcaaaaacagactcgtctttcaagattcagctcaaagtcacttcctctgtgaagccactcctgttcctcctcccccatcccaacacctagtagaagccaagcccttctgaggcttctgatgtctgccattggggagaatttcccttttatttctgcctctttgtctccctctgctagagtgcaagtcctttgaggacaaagcatgttttaatcatcttggactccccagggcccaggacaaaaattggctctcggtagttaataagtgtttgttgaacaaaaggatggctacattttttgcccttttccttcattattaaatattaaatgttcctatttacatattctgccttactgaagaggtgttgctggtccctacacaaaacggtccctgatgactgtactctgatatttcttacattctttccctgtgagtctgtttctaacggcaacctcatcttctaaatgtaatttcacacatgttactaaatcactttgcttcagcctgaacctaggatgttgcttctccttcagaataagatgccagctgggaatagagatccaggcagtcccagaagccccatgctaacaacttctgctaattcttaggctgattatgtggattattgaatagatcgtctttctgctttttatcctttaaactctctctgctcggccttgtctgtttcatcagtaaaggtgggcatggggaacatagagactgtgaaatctaaacctactctactccacttccatttggtcaggttttggaataaaaaaatctactctattagtaaagaattatagtcattttagagccattctctgagtaaaactgtcaattaataaacttggccattctgtttggggaataaaagaaaggaggagggagttaaggagcttatttcccccaattctctaactcaccaatgggtttgtggctgcaattgcctgaagtcccattgactgtgttgcctgcctattgagtaggatcttctggggtacatacaacttaaatgtagttttgaaagttgcttgtctttctctcaggtcatattgctaatattgtatacattgccaattgagcaatcagtttaccaactagaggaaatctggctcactagatttactgagcacctgctgtataccaggctctagactgggtgccctgtctccttgacctctaatcttcacaagcaatctaggaaaagtgttatgaacattttagagatgaaggaagagactcagagaggttatttacttcttgctcaagcccatacagcaatgatttcccaaacctgtagggtgtttcttccttgggtgttttgtagcggggaaaaagaaagtcaaagcctgtttccattatcgtggattttagggaaaggggagtattaaacatagtaatcagagaagcctggttcttctgaagcttctgactgtcatcaaattggaagttaatgctgggggagaagctctgtgtgaaggacccacatactcccgtctctggcccagcccaaactgccttggcttacctgaggctgccagtgacttctggctcctagatcttcatcttgcagctacgtggacaaggtgggtgcagcctggtgccttatgtctgtgctgtagcttcttaacagcaagtgagatggtagcaggcatggaaggccatcggtgggaagggaaaggaggggttgtcatagaccaaggagggtgaccacagcattccacagattcaaaaatgcccatttttaacattgtagcattttacaagtcagaatgcatcttacaattgatatgtacatgaaatgtaggattccttttccagataaactgttagtgcatcattgatacctcttatacgcaatggcatcctggattcaaggaactatggcaggtttcatcttatgtgtcaattctgatcaagtggtggagactatctggagtttgggaggagaaaggtctggtgctatgtccatggcagtggtgaacaacaataaactgagtggggcgtcactgtgcatgagagatggcatagaatcctactgtcgggcatttgcgccttcatccaatatctttggtattaaatggaggagcacctgccatatcttcaactgtaaactaaaggacacaaaacacaggaagcatttccaagggaccaggtcagaggcctgcctcttctcatgcagatttgtgactgtggcctttttaaatacttttttaaagtattaatttaattataaaaatagtacatgcatgctataatacaaagatacagaggtacatgaaattttaaatgtctcattgtatagatgttactattactggccttatagatttttacccttcttctattgtaaacaaatgtgtctttgtgtatgtctgtgcacgtacacacacacacttgtctgtctatggagaaaatcttaacagaattgtgggcaggcctcatttttaatgggcacaacatagtctacttaacctctccccattgaggtttggctcaaagcttatttcttgtttcttatgagtgtaaatgctcagaataacctgtatgaccagtgtcatagtccattcatgctgctataacaaaataccacagattgggttatttataaagaatagaaatgtatttctcacagtctggaagctgagaagtacaagatctaggtgccagcaagtttagtgtctggtgaggactgttttctgcttccaaatggtgccttgttgcatgctctggaggggacaagcactgtgtcctcaggtggtagaagggataatataagcagtttcatctcttaagacctttataaggtcactaatcccatttatgagggctctgccctcatgacttaatcacctcctaaagcctccacctcttaatagtatcacattgattattacttttcaacatatgaattttaggggacattcagaccatagccacaaggaatgctttacttacattttaaattagtttattaagatggtttcccagaaacataaacatgcttaaggtttctgataatttctgaattgatatgtcaaagatgtggttgattgacacttgttaactatgggtaaatttaaactcagtaacaaagcttttgtgtttccattaccaaagaacaagaaactattggaggtaagtcattgtatatttatgttggctgtttggcgatgtccttgttaggaatggagtgagtcatgctgcctgaatgcagtgtgtcagaggctcagggtctcagggacaatatccaggctctaggtcacctttgactttacctgccttatctgaccggctcatagcaggctggggtaagttcatgttgccacggattctaggagggatctctgaagtgtcaagtactgccttttcttctcatggttcagtgcagatggccgcagagggcaggatagttgatgacttattctctggagtcatccaatcttgggattaattcttttatattcatttgctgggaagggaaaggaagaaaaggggaagaagctctgatggcagttccctcttcctagattccctgctggtggtgcctcaggaacttcctttctttttgggtataccctcctttctttccttcctttctcagtgtttactatttgtgggagcatgtactaagtgctacgcactttacacatgtgatctcatttaactcaatccatttaactgaactgccaagaggctaagtggcttacaaaaccaattctatgatctttacatttttacttgtgcaaacgtgtgagaaagtttaactggtgaaacatctgtcaggtgaagactgatgtgctttctatgggtcagcaagaaggcagaagtatatccatctaagtatacatttatatcaaaataatttatttggacccatgtaactatagcattgattattgttttctaaatttgattagcagtcaactgaacatactattcgtttattgcaattgggtactttaaaacaagttctcagagtaagggttttttttctgttatatttttatactcacattaaaaaaagaaatatatacccaatcttgttcaaaaagaatttaggatagctcatatctggtttaatctaaaattaatactttaaaaatggaattttaaaatgataattttagtagtgttttggagactaaaattgggaaagtcaagaagctggctgttgactcacactattggtttcacattgcagaagataatgtgccatttttttcatttcaattcaggcaacgcttcctgatcacctactaagtgctgggcactgcatgtggccagtaagacctccatgtgttgcacagtagctgacagcagatcagcagacttttgctaccaggatgggcacagggcactctaactttgcaaagcagcctttagggcctcttttcaggtgcccagagattgctacggtgtaagggaaacttttgtatgttccagggctggtgtcaggcccattttcattggcaatgaccttcctggcatatgctgcattttcctatgttggtgagaaatttaattttactctccagaggtattagggaaaatattacaaaccacttttcaagttgaggttgaacaaatgaccaggtataactggttcaggaccccaaaataatgtcattgtttctttaagcattgtcattgagttgaaagccatggaggtcacaaataaaaagagttaggctcatattctaaagatccccagctctttaatttaaaaaaaaatcagtgtcaaaatgttttgttttaattacatcattgttttcagactatgctttaaagaattttaaaattagcttagttttttagtaatctatgaataaagcttctcttctcgtgtgcctgccttagagatggactgacttttttgcaaaatgcagcttttattcttagagaacttagtagtgcttaaactgtgttcatattcatcctgtcatttgagctctgtgacagccttgtgatggagacagaactggattcttacccaaattttacagatgaaaagttagaggttgaacaacttgcctaaggccaccttgcctaaagtagcagggccatttgagccctagttcaggcatatttcattgggcacactgtctttccaaatatttgcaaaattggacgcttgaatagaagaccttcaccaaaactctgcttactatttggctatttcaaaagttaattgttggatttgctgggactacctaagtgtcttgaaaaatatgtgcattctgataatggatgcaatacatcaactaagtatttttaggccccttgtgtttttacacttgttacatctttgtaatgtattgatcaaactaatgagtcggactatttggaatgagcagctcagtattatttaatgctgcatttcttgtattttattgatcacttgcctgattaattaacttatactatacttggttttaagaagactttgctggagctactgaacaattctttagctcacttttcttatgaaataaccatggaacaaggtactatttagagtctttgggtcttgttgcgaatttgtgggtagaaaatgtaagatatatttcaatacatggatataatccatttacaagtagctagacggcctttgttcaaatttgaccacctttcagacaatgagcttcacctctcaactctgcaggaagcccttagtaggtcccaaatggaaataggatctactctgtcataactatcaagcctgagatcttaaggcatccaggtagtcacttaggaatgaagaggcaaggatagattcaaacaacatttcagaggtagaaattggcttgttcagtttagaaatgacatggaaatttctagtttaatgatgccagtaactgagagaccaacggaggggcaggggctgaaggaaggggctggattgagtttgaaatattgtatccttctcctgaggaggttataacttggtttgggaatgtggagttgacatggatgagaaaagataagtaaacaaatgactaaactgcagtatgataaggccagagacagagatctgcagagcatgctgggagaacaatttgtggaggttgagaagtcagaaaaagcctcctagtgggcctgacacatgggctacattgtagaagaattaattagggagagtgtagcacagggcattcaatgcagtaaaggcagtctatacaaaggctccaacggtacaacaagagccagtagaccaggcaagttcagtgggctggaggttttaggatggttgaaagatttgaaaagaagcagcagcttagtcatgaagagcctggtaatagcagccagcacttgtaagcatttactgcaagccaggcatcgcagaatagttcagaatatgtttagaaggtagaattgtcagtatgtggtgaccagttggacatggggtagaaaagagaagtacaagtccaaagagagtcccaagtttctgccttgaccaagacagagtttgaatgaggagcctatttatgagggagaaggctgatgagctccatttgggacctgtacaattcaaggttcctttagtcatccatagtatttggatgtatggagtctgagaccagactgccccggtttgaatcctagctcagccacttaggagacttatgaccatgggtaagttacttaatccctctgtgcctcagttcagttttctcactaataagatgggaataatggcacttaaccttatagagtagttgtgatatttaaattttacataaaattatgtatattaattatatattatacgtaattttataatgtgtataattatataaatatacaatgtatataaaattgtatatgattatatatataatttaggttctagatcataacaggcacttgataacttattgttattaattattatcattatatagttctgagactcaaggacctgggttgacaccatcaaggtagagtattatatatgatcattatgtatgatcattatgtatctcttaggaggtatttggctataagaaacagaaaatccaatcatggcttttatcatgggttcttttattgtttagcaaggagtttggagataaatggcttccacattcttttagcagctcagtgacatcaggtccctggactagtagctctgtgattcactcagcctttctcttctattccataaaatggctgtgctagctcctccggttcataaattggccacactagctcaaagcatgtcaccctcaccaacagtgttctaaataggagagaaggaggatagtgggggaaaacactctcctcataggccactaccccttttgtcagagaggaaaatcccagaagcctcctggctgatgtttctgtacctctcattagccaaaagcaggtcacatggtcacctgaaactcaaggaaaggaacaggatagccataattggtttagaccagtcatgattcaatctctggggttggacactgtaaatcctaaacaaatagggtcttttagcaaaagagaaggagggaatggctgttgggccagtaattaagaatgtgcaccactctagggagggaggacatttagagaagaggacaagaggagaacccaggactccatgacattcataggtcttatagggaacaggggccagggaagagatttcaaatgccaaggaaataggagaagaaatccagagaagcaccccaaagggaagagctgggggagaggcaagtctacaggggtacatctggcagagctttgagcagaatgaggctgtaaaaagctgtcagagttggcagtgaggaggtcagagtgaccattgccagtgcagattcagtgatgccaagggttaagaagagaatggtgatctctatcatatgcagttggtaggcgtgcaaattaatccaaaatttgtattagtttggcactgtgtgccaaaatttaaaatgctcataccctttaactctgaaatttcacttctaggaattaattcaactggccaatttagacaagtggaggctgatgtaagtacgaggatgttgattgcagccttgtttgttatagcaaaacaaaaaaagaggggtgattgatctgatctgaaagcccatcatataggattaattataataaatggtagtacatcttggcagtggaataccaggaacagtagaaaagaactgaagttctggagtcccacagccagggtttaaattctggttctgccatttaccagctgtgtgacctcagctctctgtgaacatttctgggactcagtttctttagctgtaaaatgggataattataatactaactcatagagctatagtgaggaataaggatgcagatataagtgaaatacactgaatatttctggcacagattattatgcagtaatttaaaaagatttggcagatttacatgtatgtttaaaagattgtttataagatgttaagagaaagaaatgaggttacagaatatcacgatataatgatccaacaggtggttttatctgggaggtaaaatcctgggcacaattcactttctactttatacctatttgtattttttacctttaaaacaaggcatttaatgtcttattcacctggccaattataagccacaggagggaagctaccatttctgttttgttcaccacagtatatcataatatctggcatattacaagcagatgataaatatgtgttgaatgagtgtatgaaaaaatagtaagttgtgtttagaaggaaattccataggccaagagttcaaagatgcagtagttctgcaccaacaagtccccgggtagacctcagggacaaggctgcagaaatgaagcagaagtcagggctgagggttgtatattggtcttcagtatgaatgcctcagcttctgaaacagctcaggttgcaaaacctgaggaagaagagggaaaacaagccccaaagcaccaggatccagtccctggttttgttcagcacttcccaaacaggctgaatctgagagccaaatcacattttagaattgcagggcattttggtgccattgagtcatttcaacttcagaaaacccaaggccctggaaggaggagttctccaagttcctacaagacctgagacgaccctgccctgtgtttcccaattcctgctctagtgctggctccttcttccaaggactgaacattgtagatttctgatacacacgaagttgttttcagaggatgtccattcatttgactcctaagaaacccagttctcttaagcacaattcaatggcttgcgtctctaaagttcactgatcacccatcgctcttgctctttatttgtaaagaacaaagggaccagggatgtaattaactcacccacatttcccattgtccttaagtcttttgtgcaagcattgattgttgtttttattgttgaaagcagaattgttctcctggcaacacacatccagaaagagagcccagtgagggactcagcaggtgatgctgttgaagtttgaccttaccgtttggaagaataaaagaaaaagccaaaaaaagcaataattgagcagagggtcgttatgaattggttactattctatactattaaatgctttgggagaaaagacatttggttatttttaagtgcatttaggaattcagaatatcagccagctgagctcccaagtacaggtcctcaggggattcagtttaatgaatctttaagagcagcctgttgttaacatattacaattagcacaggtaaatggaggattcgaatgtgcttctggcaaataatctgttctcacttttatatcttagtcattacttactcatacattgatgtttactctgaggttgttttgctgggaagaaaggatacacttagcaaagcaagatgatatggcagaagagagcttgagatttgggatctaaatatgaccgggtggaatattggctctgttcattagtacagtcgtgtggtcctcaggaaattgctgaaatcctctgaatctgtttcctcctctataaaatggggattataaaacctgtttcagtggattgttcagctgattcaaccaaatcatgttaaaagggctgctgcatagctcaataaactttagcttctttccctcaaagttaagcttttcttccctgttcatctaaaaaatcaagcaatgaattactgaaaccttttcatagggaagagaaggcaatgttttgggttctttacccacattttgcccatacattcgactttatccaaagaacgctttgagttgctgcaaccacctgcacgctgagaagacaaaggtgaggagtagggttaaaagcaggttcatgtaggttcaactggaaaaccagctgccacggaagcctcaggcatatctaaatttgttcctccctcttttccttcctaactccttaaggtttgtgggcgggatcatgtaggatgacgacagccaaagggaaccatccaaggctctgaggtggagggagctctgcttgtttaaggaactggagctcggtgggtgagacaaatggtggcaggagatgatgcctgagaagttggcagggaccagattaggtggggaattgcaagctggcattataaagtttggattttaagtgtaatggaaagccactggaagtctttaaacagggaagtgacatgatttattattttaaatgtgcgctctggcttctgtgggaagattggattgtaggggctaagtatggaagcagagagataagttagaaggttgttgcagtggtttattgagtttgggtgctttagggtgctggagagaaatactgtgaaggtaaaactgacaggcagtcaaaggtgaggcttaaatgaaataacataaatgaagtgccaagtgtgtagtagataattaacaacacaagttccctctcttcgtgctacaactatatcaacaaagtgatgtttttctctggaattggatatagggagatgataaattaataaccacattttctcagctatggatttgttctttggaggtgggctgactgggagatggaggtcagcttttgcagatcacagcctgccaactgggaacacttgcgaaaggaagaaataatagaagcaggaagcaggaaaggagggaagagcagtatggaaaaaagactgggccaggtgcggtggctcacgcctgtaatcccagcactttgggaggctgaggtgggcagatcatgaggtcaagagtgcaagaccggcctgaccaacatggtgaaaccccatctctactaagaaaacaaaaattagctgggcgtagtggtgggcgcctgtaatcccagctacttgggaggctgaggcaggagaatcacttgaacccgggaggccgaggttggagtgagccaagattgggccactgcactccagcctcggtgacagtgcgagactccatctcaaagaaaaaaaaaaaagactggaaggagcaatttggggaccttatctccctcacaaggcatgtgacagtggtatggcttggctgcttcagtgccctagtactcaaacccctaaagggagaatgcagatggacaggtgcagaggtcatggggagcacttttgggcttcaaccccacggcagtatcttggggtgagtgcttacgactcttgaagccccagtgggtgtgtgttacagtgtgctctttctgctttgccatctgcaggtggcttgtgttaatcagctcaagtagaccctctgccttatcgcaagagcagagggctttctgtatcctgagttcttgcccagtgtaccagaaaaatttgatcacaggtgggcttggtgcaaggttctgttgagtggtggaggtggcgctcagcaagatggatggggggccagaagagggatggagtgggaaggtggtcttcccctggagtcaggctacccagtggcagactgtcctctgatggcccctggctgaactcccctcagagtccgcattgttccaccatcgctggtctgccagtgtctgctggtgtggtcctctgctcctccgatgtctagccgcttgtgtgtgtgcctgctaaggtctcgggtttatatgggcacaggatggggggcatggctggccagagtggtcttggaaaatgcaacatttgggcacaaaaacaagagtgcctgttctctcttaggtccatgggcacaggcccaagggtggagcccctgccagggaccccactcttctctacccagggcttccctgccctacttccgcatcactgagaaatgtgaggacattggtgtgtgtggaaggtgctggcataacagctggagttgcatccttcaagtgacaatataggtatatcagggcagtctgctatgattagaactgaaaagaatctggaggccatatcatctgaattcctcattttaggaaactgatctctagagagaaaaagtgacttgggcaaagccacagagataatggcagaggcagggctggtagcaaactagagtgggaagagattgagttttaaagtaagagactgggggtgcagtcatttattcagcaaacatgtaccaagctcctgttccatgtcagacccaagtctaggcaccgggaacacagtcaaataaaacagacaaggctcctgcccccatggagcttacattctcattcctcctcttacagactcttctgagactaccatggcagtccacctagtttgccttcatgaatcgatttcctcttctctaaaaagggagtagcaatacctctttaattttaattaattcatttattcattctacaaatattgatcaagtatatatgatgtgccaggcacaatgctaggtgctggtgacccaaaagtaagcaaggtagaaccagcccctgctttcagatatgacgaactagaggcaagatggttgtcatcttaaatgtccatcaaaatcacctgaagcccttaggaggtcactgctgccctggccccatgcctggagctgtcgattccactgctctggggtggggctaggcatcactattttcacaaaccttccaggtggttcttataggggtggggtgaagaagtgctggagaggcaaagataaagggtcatgcgggtggtggtttggcaggtggagggtgcagcctatcagacctgggttcttggggctgggaaatgcttcccagaggaagtgactcatcaggtgagaccatgagtaggactagtccaggaacaagaagtgggagcagtgtctgggaaggccagagcccccagaggttgctctgagggtaaaaggggtaacagaggtggaccatagtccgtggtcagagacaagaactatgccattgttcctttgcctgtttctctctctttgttctttccagccccactcccttcctgttatgttctttatcctacaatacaccatactgacagcacaacagctgattctccagctcctaataattatctgaaagagcttcctcctgtcatccatctcatgtccactgcttctctgcaaggcaggagccagcctccggctcccttcccacagcttccagctcaattgcctccctacagcagagggaaatgctctctttgctgcatgatttgatcagtgtattccccccaaccctccaccttcaggtgcacaaagacaaaatgcattctcttcagatatttgatttgttttgcaagtaagtgctcagtacccaccagctgataaccacattggatgtgtttgacaaatagtccttgagtgttaccataaatctataacttgatgagagattcttattgtcaaaatataattagatcaaagtttggtatttcccaagggtgtaaggaagttcatggatgtgtaccatattcagtaagatatacatctgtgcatgatgtctgccattgtcactctaaaacaagagggaaatctgacatgcttttacgtcctaaagaaggaagatattcagtgacttgtttaagtctcttctgaaataaccctcagcagagcctgagtttattctcaaggcgagggggtgggggaaacggggtgcacaaacagttttgatcccatgccgatgtctgctgacttacgcagagaatacaacaagcttcagggttaaggaaaggataacagggaggttgagaaagaaaaatcagtctgctggaaatgtcattgtcttaagcgagggtggaggagagttggagagtccttctcttctatgtataatcttctcaatgcattgtaaaatgttttaaagggattatattatttctcctgcctgtgaggttaccccaacttgtctcctcctctctccccatttttcccatttttggctcttttgacatgtaagtgagaccagaaacaaaggctgtcatctcatccaggcagccatttgtccacacttaccagtaaactgaatttgccaagaactcccactctgcagtctctgggagaggcaagatgataagcttgtgcctctgataaagcctgcagcctgggatgatctgggctgagtggggagactgaatccatgggaaactgcatcccttgaggagactcgtctggacttctctctgccgggaggcactggcgttgtaagaaatgaaggaatggggtcaggggtggggagcatccacaactcagatgtttaaagagccagagctgcaaacaaaatctggctaggaacagttttcttcgactgacctcactagatgcctctttccaaaattccaagccctcttggggcacacggggtctttctggaagttggtgatgtcgtggaaaggtcactaggtttggatccaaactgcctagtatgagtttaccatgagcttcaataatctgatcaagttccaacattcctctgagcttcagttgcttctgtgagatggaaaacaccatcccttctcaggactgtcagggactttaaatgagctgacatagttaatacaaataaaccaccagcacagtgactgggacacagaaggacctcagcaaactgagtttttgctcctttttcctttgctaaatgaaatcaaaccattgcaaaccccattagtgtataagagacattcatttgtccatccctgaaggtgtaagcacaatataaaaaggcttcccaaactactcaggcggagcaggatagagagatgtatgttttgctgagctgatcataaatctgaatgaagtaattatgtaaagtattcaagagcaattcagtaagaagatgcctcatctgccttgatgggcttttcaattactcatttttagtactgcattatactgttctctggcaataattattaaacatttcaactgtactgctatataaaacttaaaaggctgatttatttcctaggcattagactacattgaataaaatcccccaattacatggttctattttttaaaacctgtttatcagtgattttctagtattgagtcaaaactgacagcaggtcctcatgtgaaaaataagggtacagtgtgttaaatccagcggttattagctttggggtcatggaggatattaatacagaccccctacttgctagtcccagtttctgaatctgtaaaatggggataattcccacttcactggattattgtttgaaataatggatacaaagtgttagcaagaatgtagagtctgtgccaggtttggtggctcacacctgtaatctcagctctttgggaggctgaggcaggaggattgcttgaacccaggagtttgagaccaacctgggcaacatagacctcatctctacaaaatataaaaaataaaaaatattacctcggcatggtggcgtgtgcctgtggtcctagctactagataggattgcttgagtccaggagttcaaggttatagtgagctatgatcttgtcacttcactctagccggggcacagagtgagaccctgtctcaaaaataaataaaaataaaattttaaaaaagaatatagggtatttacttattaaacactagatattctgagattcactggcatttacatatagccagtgagaatcttcccacttattcagtgtatatgcatcaatcacctactaggctctaggcactcaagatgccaccagggcccattctctgattgtcacttcaatgactcaaagtcatggtcatcaagcatctagcagctccaggtccccttctgggctctgtacacaggacatctttcatcatgtgtagccattttccacataaggatgtgtactcacagagagttgggtgactttactcaaggtcattcagtagctaaggcagaaatcagacctatgtctgctggctccaaagtccacatcttctctccccactaccccatgctacctctcaggattccaggagcacatttcacctggtttgaaggataattcctcctcctcttcctggtttttctagaggagatagctcttttcttattgaggattacccacccctgaaaaattaccactttcccgaagtctgtctctacttttctcagcatcttccaattctcacctggaagatgaggctttctattctaactgaggactacaccatgattcaggcagtgacccctacacacacacacacacacacaagcatgtgtgtgcccagttctactggagcctgtccattgtacttgaggctcccaagccaaactggatttaggtgcaggccagctgggctggtaccctggataccagtctgtaaagagaactaaaatgctgctggaaatgtaatacagtggagaaaatggtctttaccagaattgttgagagcaagcgggacacgagaatgataataataatatttatcaatgcacagtgattataatatacactgatagttttgttgataaactttctccttagttcagccaaaaccgggctcttgtcacatgatcaggaaaagattaggcttgtggacacagaatggtgaggaaaacagaatttattgggtgaaaaggaaaaaggaaaagcaactctcagcaaagtgagagagtcctcctatcaggtttcccgcctcacacgttgaatcccaggtcaccacatagcaacgggagaggccaggctcctccccactgaacttcctgaggctccaccccattctcccagtgctcaggtgggcgttattcagaaagaatcagtcaggaaagggtggcttcatccaggaagtgtagtcaggtttttcagccttcaggctgttttaggtttaaatatggagttttgctggggacccttggctgcctcctgtctccactggttttgtgccagaagcttctctaacaactttgtatatgaattcatataaacacttctggcccattgaggtagatgctattatcagtccccattttacagataaggagaatcagtccagaaaagttaaggaacttgccagagtcacaccagtaataaataggctgctggactctcctaggactttgtattgtctcctggtagggggaaaacccccaagagcacttaagtgacaagagctggtatctcagtgaccttccaggcctcttagttgctgggtgaggtatgcaagtttagggcagcagttgaactactcaggttaatagagtgagcagtgctgagctggcagtctgcctgccctcctcccacgcagcactcagcctatcctccaaatgaatgttgggcaaatatttagagaatatcgttttgaaagggggccaggttattagcctgcccagggcgcctacgcatcttggcccagccttgctcccaagcctggcctgctgtctgtgctcctaatatgtgaaacaactcacatagcatggaggattaatctgcttttgggggagaaatgcaatctggtgtttctcaggactaaacttctgtggattggatgccacatgcccggtgccagagggtccgccaatggtgctcgtggccacgtcacctcccccacaatcccacgtgcttctcaagtctggaaagcacagggtacactcccgggaagagaaaataaagcaagtgagattttaaaagatgaataagatggaggtaagaatccgtttgaagagatgctaatgcaaaaagggatgctagttcagagacatgcaaatcaaaactacaacgaggcaccacctaacagcagtcagaatggctgttgttaaaaagacaaaaaataacagatgctagcaaggctgcggagaaaagggaacacttgtacactgtaggtgggaatgtaagttagtttgtccactgtggaaagcagtttggagatttctccaagaactaaaaacagaactaggatttgttccagcaatcccattactgggtatatatgcaaaggaaaataaattgttctacaaaaaagacataagcactcatatgttcattacagtactattcacaatagcaacgacatggcatcaacttaggtgtttgtcagtggtgaactggataaagaaaatgtggtacatatataccatggaatactacatagctataaataataaaatctatcctttgcagcaatatggatgcagctggaggccatcatccgaagcaaattaactcaggaacagaaaaccaataccacatgttctcacttgtaagtgggagcaaaacactggattcatatggacataaagatggaaatgatagacaccaggggctaccggagcaggaagagattaatggggaaaggtctgaaagactaccttttgtgtactgtgctcactacctgggtgatgggatcattcgtaacaaacctgtacatgtacaccctgaagttgaaattatatatttttaaaaaggatgctataacttttgtgaaagttaggctggaagatgggggtatttgtagggaaaagggacaggatttaagcctaaatctttacagtttagaagagaggccactgacaaaaagtacactgaataacgcagtcaatgcagccattcaaattatgtttctgttaagttcagaaaaacctggaaaaatattgaggctcctaggacaaatggaaaaagaaacaagacacattatataaacaaaatcagtaccgctattaacaaattttaaagaatacatggagaaaaggctagaaggaaacaaaccaaaattattcaaacagtggaggatttttttttttcctttacttttctgtcctggttaacgtttctatgataaacttactttttaaatcaataagggcaaaatctgaattttaaaaaatctatattgaaagccctttcataaaagacaaaagcaactgtctttccttccatggctttcagattgaaaaaatacacgtaggaaactagtaagaggtgattcaatgactgggattattttctttggattctctctcaggttttactgaagtagttagaaagcccttcctgggcagattcagcaataataaactacattaatttcatttccagaaaaaacttaagatgtcaaatttagctaagggggatcataatagccccaaattataaacaacaaaatgttcaacgtgctgaggtttgttaggtaaaatgtggaccaaataagatgaggtattatgctgccattaaaaattttattgggattgtacattaaatggaaaagaaatatgttcgtgatatggtgtgaaatgacgagttataacatgggaagcatactttaatcctgtcttttagaattacatttttatatgtatatgtatgcacaatctaaaatgatatacaccaaaatattaataactatcttggggtggtggaatgatcaggaacgtttgtttcatattttttgctcccctatgttttctgattttctacgatgaacaaatatctgtatggagtaattataagaagcttatttgtttcccctcttaaaagtgtcttcctcccatgttagccagcctgtggtgttaatgcttccctctggggatgtgggccacgaccagttaggagaggggtgcacggcacacaaggggaaccacaacataccgagggcctgttaacagctgctggctgcttcgtcaatactatctcatctattccttctgtccatcaagcaagatggatattatcatcctcattttgcagatgagaaaacagacccagagaggtcaagtagcttggtgtggtcaaagtcatctaattagaaagtggcagagccatgatttagtccaaatctacctgcctcaaacattcatctactttttactctatcacactacttctcatgacacctctagagaagaaatatttataaagtggtgtcatagcacatgtcttccctcattccccaccctggtccctaacttcagtgccccctatactccctgactcaacagtgcatatttagatgtcccaatgccctgttcttcaggcccagcccacccagtacccacatacccagaccagaagctgctgtcctcaattgggggttatcacaccactatccctgataggaaactttggtcgtggtgcctcagcattgaccactgagtcccctgagttgtttccttaatcacatctcacatcctccacagaagatgtcccttcttatcccaaggcccagtttctaagactagcctctcctgctcactctgctccaagcccatgttcatgggactagtttcctgctgtggatgctattccaagttcctgttctaattatctgacttctccttgattctcatgtgggaactggagccctgacctggccactagtcctgacctctgtgtctggggctctgcttcctgaagacaaatgtcccagatgccacttacgtggactttggaatcgtattctcctagatgtctcactgccatggcccacccacgtgttagaacgcttgcaacttcctctgggaccttgatgctgttcaggttcatctcttgaggcttgtgtctcttgaaccagaaagtgtgaggaggtgacgtatcaggggagataatccagatcagagttgaggaggggagtcaagattagatttagggaagaagggttgtatgttcagatctgaaaaagaaaagcccataaataggctgagggaagagtaggcaccctcagagtaaagatgggtcatgatgtaggtttcaaaatgggtatggcatgtgatttaggactaagactgcattcaatgaaaagttttagaagcctagaaaaatcattctattagcttaaaatgcccctgatatttgaaaaggcatattcatgaccagatacccaaccagttgctttaacaatagactgacaagtattggggaaatcaaaccttgtctacctgtctaaacttggtggatatctgggttgtctcacctggctggatgggaaccagtcacagattaagatttctccgtctcttgcaaggagtcaagcagctgccttatcagcaaatctctcccaaagtgactttaaacttaaacttaacccaagaaggtttatttaaacctatatataaaatagaaatgttatcattggaatgttgtaattaggtcctttaaaaatattaagctgggtgtggtggcatatacctatcatccaagctactcaggaggctgaagcgagaggattacttgaacccaggagttcacagccagcctgggcaacatagtaagatcctatttaaaaaaagaaaaatgtataacctcttcatctaaagtaatacatcatcattgttgaaaatttagaaaacacaaaaattatacaaaggaaataaaaatcacccataatactattactagacacaaccactccattgtaatatgttttaattttctgtcttaggtaaaaagaaatcacagattgaaatgaatgactgccatttagttggtagctaacacggtaggattctgagacccactctagatgacgagtgtggagacgtttgggattgccaggaggtttgagagcaggttctgatagtgcaaggcttttcagaagaagctgatattttctgagaagcaaacaatgtttggaggattctctggatcgagagaaataactccttctgttcaatgtttaattaccatctggcaactgaggttgtggataaacaaccgtatttacctgaggtagcttctatggattggagaacattcttctttgtttcacttctgggccaagggtcttagtcttatgtccccctgggatcttggtcagagttcacctggagagagcatggactttggcttcagacaaccctgggtctgaatccagacagatcactctgagctccagttcctcatctgtaaaatcttctgttcctatcaaaggtccagtgatatgaccatgctaggtacctggcagataataaatgttaactcgatatgagtgccttttggctttcccagtgtagtcacccagaaccttcccaaggattttaaagatttaggattaaaaattcctgccaaagttctctgcgaccatcagcaaacagggtcctcactggactcactattctgcaagtccaagaaaatcacattgtttggaaacctaccctcacgtcaacaaagctgcagaagagagtctaagaacctgttaagaaaatatgaagcaaaagtactattcacttttaccaagtacttatgtgtatgttggagtggagtggggtcttttgttgtgggttggtccagtgtatgtggtttcatgggactaggattggctagagagaaatttcctgcctatcataaaggatatggcactattaggagggactgtagcataggggaaagagcatggacattatggccaagtagggctgacctcaagccctagctctgccattctgggactttggacaggttgttgaacccatctgcattacagtagtttcctaaggggtgggtttaataatgcttatttttcagtgtttgagggaatggaaataatatatgtaaaggtcttcatcaagagaaagtgctgaaaaatgctattattattatcaaggctattaataaccatctagggaaacaaagtccaaattcagaaggaagtccagggaattatctaattaaaggagctgagacacatattgtggccaagtcatatagccaggaacctcacaacaaaagggaggaggcaagtacacttagttctttttttttttttttttttttaagacagggtctcactctgtcacccagactggagtgcagtggcacaatcacagttcactgtagcctcaacttcctgagtttaagcaatccttctacctcagcctcccaagtagctgagaccacaagtgtgcaccatcacagctggctaattttttatttttttatagagatggggcctcactacgttacccaggctgatctcgaactcctaagctcaagcaatcctcttgccttggcctcccaaagtgctggggttacaggcatgagccaccatgcccagcctactacacttcattcttacagtgcacacttattagtaccagctaccttgcaaagtggtgatgaaatgatgactatttttaaaaaggctttggaaataggaattgaccagggccttggcaggagaagacacctgaccagtgtacaaagtgcaggaagcaaggagggagatggcacaatgtgaggctagaggcagggaggcaggaactagcctctgtgtaggatttcagtcttgattctgaaagcaatgaaaagctgttgaaatactctgaggaaggagataattatattgtaatgatatttgtgtttttaaaaggcctgtggcttgcagtatagataacaaattggagaaagacgagagagtatataaagacagttagaatgatgttacattagttcagagaagaaatgatgtagcttagtccagggtaatagtaagaatggtggtagacattcaggagatatttggaaggtaagatggacaacatttaaatatggaggatgaaggcaaggaagagccaagggtgacctccagggtttccgacttgcacaattggagtaggaccaggttagaggaaagacggttaatggttaggttagttattaacagggtatatttgaggtgtttctgatatatcaaaaggtaaatgcaagtaaaagatagaaagttggagatacatgcctggaactcagagaagcagccaacactagaaatataaacgaatgaatcatctatacagaggtagtaattaaagccatgagttgaatgagatcacctacagataaagaatcaagtcagaacaggagagggtttacgactgaaccttgagcaagttcaaatttaaaggccagtagtggaagatgagtagccaaagaaagtggagagagtggatgggggaagttgggggagggcaccaagaaggagctatggcacagaaggcaagggaggagagtcagttgagaagaaggatgacataggatccattggattaagcattgcagaagcttagctagagttattttggtagtgcaatgtggcctgaaaatacacagaactgggttgatgaataagtgggaggtgaagggaagacagtaagtatagctaccttattcaagtaatttcattgtgatgaagagagagagaagaccgtaactggagggggatgaagagttaagtaaggtctcagctttttttttaattttattattattatactttaagttttagggtacatgtgcacaatgtgcaggtttgttacatatgtatacatatgccatgttggtgtgctgcacccattaactcgtctcagctttttaatgggagagatttgaatgtgcttaaaagacaatgacaacaattcagttggagcacaagttgaatccagagaagagtaaggagataattgttagagttgggaagaagggatgggaccaagacagtgtggtattagtaaaaaaatagtctaacagagcaatggagtataataaaaagcccagaaatagacccacacaaatatagtcaactgatctttgacaaaggagcaaaggtaatataatagagcaaagatagtcttttcaacaaatggtgctgaaacaactgcatatccacatgtagaaaaaaaaaaagaatctagacatagaccttacacccctcacaaaaattaactcaaaatggattacagacctaagtgtaaaatgcagaactataaaactcctagaagacaacacagaagaaaacctagatgacattggatatggcagtgattttttaagtacaacaccaaaagcattatccatgaaagaaataattgataagttggacttcattaaaatttaaaacttttgctgtgtgaaagacactgtcaagagaatgagaagacaagccacagatttgaagaaagtatttgcaaaagacatatctgataaagaactgctatccaaaatatgcaaaaaactcttaaaactcaacattaagggccaggcgcggtgggtcttaattccagcactttgggaggccaaggcaggcggatcacttgaggtcaggagttcgagaccagcctggccaacatgatgaaaccctgtctctactaaaaatacaaaaattagctgggtgtagtggcacacacctgtaatcccagctgcttgggaggctgaggcaggagaatcacttgaacccgggaggtaggggttgcagtgagccgagatcgtgccactgcactccagcctgggtgacagagtgggactctgtctcaaaaaataaataaataacgactgggcgtggcagctcatgcctttaatcctagcactttgggaggccaaggtgggcggaccacttgaggtcaggagttcaaaaccagcctggccaacatggtgaaaccccatctctactaaaaatacaaaaaagtttagtcagacgtggtggtgggcacctgtaatcctagctacttggaaggctgaggcaggaaaattgcctgaacgtgggaggcagaggttatagtgagctgagatggcaccactgcactccagcctgggcaatagaatgagactccatctcaaaaaaacaaaacaaaacaaaacaaacaactcaacattaagaaagtgaacaacccaaataaaaaatggtaaaagacccaaacagaaacctcaccaaagaaaatatacagatggcaagtaagcaaataaaaatatgttcaacatcatacgtcattagggtgttacaaattaaaacaataatgagataccactatacatctattagaatgaccaaaatccaacacaatgacaacatcaaatcctgtggaggatgtggaacaacaggaactctaattgttgctggtggaaatgcaaaatggtaaagctgctttggaagacagtttggcagttaaatctaaatatactattgccatatgatccagcaattgtgctctttggtatttacccaaatgaactaaaaattttatgtccacccaaaaacctgcacatggacgtttatagcagctttattcataattgccaaaactcagaagtaaccaagatatccttccgtaagtgagtggataaactgtggtactttcagacaatcagatgtcattcagtgctaaaaaagaaatgagctattaagtcatgaaaatacagagaggaaacttaaatgcatattactaagtgaaagaagccaatctggaaaagctacatactgtatgattccaattctatgacattcaggaaaaggcaaaactgtggagatagaaaagattagtggttgggaagaacaagggatgaataagaagagcacagaggatttctgggccagtgaaactatttcatatgatactacaatggtggatacatctcattatacatttgtcaaaacccataagatgtataataccaggagagcagcataatgtaaactgtggactttgcaggataatgatatgttaatataggctcattgattgtaacaaatgtatcattctgatataggatgttgatagtgagggagactgtgtgtgtgtatgtgtgtgtaggggtgaagggacagggaatatgtgggataaccctgtactttccactcagttttgctgtgaacctaaaagtgctctaagaaaataaaatttattaatgtttttttaaaaaatgaagttggatccctactctatcatattaaaaaataaactccaaatggattgaagacctaaatgtgaaagggaaaattataaagctaatgaaagaaaatattggagaatatctatatgatctcagtttctttaggcaagatcataaaagtgcaagccataggagataagttgatgaatttgactagaagaaagttatttctgctaaatgaagaattccaaaggtaagactaacctctgggtgccagaaaggaaaagatatttgtagatgttgaggtattcatgtctagaaaatcccccaaaacagcaagaaaaagacaatagaatccactggcaaagattttgaatagacaatttgcagaaaggcaaacctgataaatttgtgaagatgatcaaatgtagtaacattaaaataagatactacattataagcatcagattggaaacagttagaaaatccagtaataacaagtactggtgaggatatggaggaaattaggaacactagtacatggctgatagaataaaaggtatagctattctgcagtacttagtgaaattaatatgactatacccacaacttagcaatcctactacattatcaatcttgctgagaaactctgatcacaagtacagcagcatgaggttcttcattacatcaatatttgtggagacaaggaactggaagtcaactaagtgcccctcactggaagaatggttacataaaatgtgatctatgcatgcaatggaatactaggcaacagtcataaacaaattacatttacatgtagtaacaatgatatagctcaaaagtgtaaagttgaatgaaagaaccattaaaacacaaaacaattctaaataacacacacacactcagaacaacacaaatacttaggagtgaatgctaagtagaggaggaaaaatggaagtaggataaaaagtataaagataaaaagtaatagaaaatggtctttgctttgtccagtgataaaattatatgataaactatggagtttgaggtacttcattccttttgtctgttgtcctaaaaagaaaaggaatttttaaaagtaaaataaatacaatataggtataataatttaataagattgtgttttgaagattaagtcagataaagcacttaacttagtgcctagaacatattaaacactcaatgaatgttatctagtaatgctatcaacactattcatgatacagctactaccaatctattggagttggcacttaaaaccaattggatttagattactttctcccaaaagatcctttcaggtctaatatactatagttctgcaagagggatagggaaataccacaggaggcccagaagcaacaggcaggagaagagatggaacatccttggggaatgggaaaggctaccatcttgtttgtagcatcataggaaactttgatggttaatttgggagaatactgattagtaaatacaatgcacagattaaggaagtaggaactgcgctagtaaaaagtgctatgaagctgggatactttatatactttgctatacttcctccaaaagggtgttttaacattttaagttataaaattgtagctgagttatgaagttttgctatgcagtgtttgatttggattacccctcccccatcctccttcttccccaaagtgggacacaggtcgttctattgaaataagcaagatcatcacctagtggttaattcctcaaagtgctgacacaagatttggtcccagagagcaaagatgtgcccagtctgcgtcctcatacaatgttaattcattcaacaagcgttgactgggactttatgccaagcactattctggtgcctggggatacagagttgctaacataaaatgataagtttaaaaataaagttaaggaagtaccaacttagaagcttaagcgccctctcaaaatgatgttgcatgtatttatttcccactggttttccgtagatcatagacgaagaagaaactcagtttatgagcaattgccctgttgcagtcactgaaagcactccacggaggaggacccggatccaggtgttttggatagcaccaccagcgggaacaggctgcgtgattctgaagtaagtaaacatggaatccttccctgcagtttatcaaagactttgtggtgtgattgcagggaaaaaaaaaaaagttctttactgagcatcagaaagttgcatcatctctctgccctcccttatctgaattctcaatagcaccatagactatcattggtgaagtgttccataaagattcatttgctagaatctctattttcatcaaataggatgattctcctggccaccctgtcctaccagagataattatattagggctggttaagaaaaattacaaaccaggtgaagataatctttgactttttccacctggaatttaacactttttcttttctcggaacatacagcacctagaatccttaaacactgcttaggctgccccgagacccacatgtgacctccattagccctgagctccactttatgatgctatcttcttctttgcccatcaaaatggccctctggtgccacttcctatctggcctcctgacctcctttcagtgagttataataggtgataaaaggtattaaccagccaaaggagttttcctctggaaggtagcattatctcaaacctgtttctccaaacttatgtgccacagaatgatggtttgggaaatggaaatagatgggcaggaaaatgatttctgtggtcaaatgtttgcaaaatgctgtgtactagatacccttcttacagattcataatactagcataatgaaggttttgcaaagtcctggcgaaaaaaaaaaatctgtttaatttggtttcacccagtatttatggtgacatctattaacattcacagtttggtgaaacataggcataatctattttaaataggtttgaagtcctatatggaatgatgctgagaatgttaggatttcataccagcaaattagtcatgggtagatggagagggttccagtcctagcatccaagaagtcacttttttttaatggaagtaggcactgagaccttcccaacagcctttctcttttttaaatcctcgaaggtcttatttatgtatttggttcatttgtcaaatatagtcattttgacagacttaacaactgtggttaactccagcccacccctgaggagatcccgataagaaagcccacctaggcatcgcaatacctgcagttcttagacttccactgtgcttggcttatggaaaaaaccccacagaatctctgaagcatctgtccattgtccagactcacccgtcattgtctggcctccctttgccgccatctgtctggacattatttgtttctttcttagtttaatgcaagctgagcatccttcctcagattccttgagcagtttggctcttggcattaatctacactggtcattaagaaaaaatcagaattttaaaagatgaaatcatatctataaatgtcaatatataacatgtctatagtatctagttaaaatgtgggagatggccttgtggaaatgaacaaagacccctgaaatgagaacagagactgtgtgttcagagcctgttgtataacaagggagtcagctgccattactagcatttggcagagtctcaaagacaggcagaggactgggaaagccttctagtgaaaacaagagaagactgattggaggttccttggcatgaggaagctggaggcaggctaactacaagtggagcatcttatgtgattggtttggagggcatatttggcttcctctggttagttctgagttgaaagttggggaggtggtgagggcaaaaaatagagcagttgacagttccttggacaaatgctgattttctgtgtcaattgctggggcccagagactaggggtcagagtactatggtcactgtgataaataaccttgctattgtctgttagtattttcactcttagcccagagactgggttcccagcttggccctcagtgcccatcccactacccatgacagcccaatggctccacagagcctggagctctaaagaagatgggctgaaaatgtcagatctatgtgaggagccttcctgctctaaaagctctcatccctctggcccagatctctggttttctttgatttattgttcttacaacccagaagcattagatctttttggtggaagccagaaaggcatctcttgtttacccattaacaatcaacgttatgtgtacatatgtttatccattaacatgtatggcttattcatttgctcattcttccaacaaatgcaactgagcttctattagcccaggcatccaggatatacacaatggaggtatattcttgaccctggaggttcttacaagtcaaataagggagagagaaaaagtcaaccaatgctttctgtgtaccaagaactcagcacacatctagcaggctttgtctaatttgatcttcacagaaaacgactcccattttacagaggaggagacaggccctggggatattaggcaagttttttaaagtcatgaatccatgtaatattaaagtccatgttctgcctttcttttatttattttttctctgaaggaatcatatataagctacaactatttattaaataaatagtaattgtatgggcaggacataaatgcattcacctcgtaaaatttcaaacaatacaaaaagtagtaaaatacagaaaaatacagaataaagaaaaagttaaagatccatgacatcttggctggacacagtggctcatgcctataatcccagcactttgggaggctgaggcaagcagatcacttgaggtaaggagttcaagaccagcctggtcaacatggcaaaaccctgtctttactaaaaatacaaacattagctgggcgtggtggtgcgcacctgtagtcccagatactcgggaggctgaggcaggagaataacttgaatctgaggggtggcagttgcagtgagccgagactgtgccaccgcactccagcctgggtgacagagtgaaaccccatctcaaataaataaacaaacaaataaaatccatagcatctctctcaattccagttttctacacaaaggcaataatagaatcaatttggtttgtatgctttagacttatctctgcttttacattcacgaaggtaatcataaaagcacatagtttcattcctgtgggaatttaaggttacacaaatggtatcatgttatgtcctgaacttgaatggtttttcactaaataagatgtattagagatatgtctgggtcagtacatacaaagctacctctttttgttttttaactgctgcatgtctatggtatggatgttaattattccaaagttagtggacatttagattgtttctggtgtcttactatgacaaataatgttatgatgaatatcctgaaacttgcctattgagcaaatttccaagtttttatccacagtagatgccaagaaatgggatcataagggatgcacatttataattttattagatgctgccagatttttctccagaaagcttgccaacttaaacactctccctgactgtgaacaagagagcctaaatctttacttgctcaatggcacttggtattatcaatctttaagattcataaagattgtgtgaatggcccattcatattcttgtccattttttaataatctgtcttttaaaaattgatttacacggccgggcgtggtggctcttgcttgtaatcccagcactttgggaggccgagccgagaggggggcagatcgcctgaggtcgggagttcgagaccagcctggccaacatggtgaaacccccgtctcttctaaaaatacaaaaattagccaggtatggtggcatgcgcctgtaatcccagctactcaggaggccgaggcaggagaatcacttgaacccaggagatggaggttgcagttagctgagatcctgccactgccattcagtctgggggacagagtgagactccatctaaaaaataataataaaaatttaattatatatttaattttgttttaatatatatattatatttaaaatatagcttataaaatgtttttataaatatatgtaaatacatcttatatatttacatacatataaaataatttgatttatttagaacatatttatgtttaaaattgctctttaggtagtccagataatgacactttgttgtaaatttcaaatatttctctccacctttcttttaactttgcttgtgggtgtctaatcagtcaaaagtttgaaatttttatgtaatcaaatgtatccatcctttcctttatgaattttgattttatgtcttgttcaaaaataattttcctatgcctaaggctataaatatattcccatattttatagattttaaaataaatgtaggtctttaatcttcctggaatttaatgttgtgaatgatatgatattaataagctaccacagaaaatagatggcatgctcaaaatgaggtgccagaggaaagtttaataagggtctattcacaatggtgggggcaaaataacagtgaaggagggctatacaaggagggcctgaagaagcaaaaggaaaaggcagagaggatggggtagagaggaccacccctttacaggagctaagaccttcggttaagggaagcaactagcctcaggtaccccaaccctactcctttctctaattccttgtggactctccctttggtgtggctccaactacaggaacacagagcccattgatataatctttacggagtattctcagtctttaactagggagcagaagagtagagcaggtatccagaggaacaaatcaaagatatccaccatagatgggaaattgaaatctacctatttttccccaaatgggtagttgtcccccatccatttatcaaatagtttattctttccttgatgggctgagatgctacttcattaaatgcaaaatttttatacaggtctggtctgttctgttgatctttttatgtattcttgcatgaaacccacaccattttatagtgtaaaatggtttgaaatggttatgttttgatagcaagtcattgctcattagtcttctagttcaaactgttcatggtcattcaagcagatttctaattcctgacaaatcatagaataagtttgttgtgtttgataaaaaatcattttgggatttcgaatggctttgcactgaattaatagtttcccagaatacataagatgcattctcagtcaaaaacatggaatgttccatatttattttggtctttcgtatccttcttaaaattttgtaatttttcttcatttagattgcacattcttgagaggctttttccccacataggtaatttatagttttatttcttttgtgaatgggatctttgtcttgttgtgctttctaatcattgatcccttgtgtttagaaaagctatcaatttttgtaccttaagtttgaatttgggcactgctgaactctcttggtagttctactggcttattctttcattcttttgggattgtcgatgtaaatgatcatatcttaaaataatgaatatatatatataccttttgtttcttttttatgttttactttattatctagcacctctagtacagtattgcatagtagtattcatgcttattccagattttaatgggaacactattttacttttaagtgtaatattcagtattacagatttcaaatcagtgcctttaatcaagttgaggaagaccctttagctaagaaacttcccttctttatcatgttgaaggtgttatttgggaaaccaaccaaccagtattccatgtgtaagagtaaggcaagaagtgtaggcacccagagtataccagacattgagaaagattcagggtataaacaatgatcctgactttcaaaacactttcagcctagttgtgatgtatattaaaatatttatgcaaaagctagcaaaccgaagacagatattaatgggggacaaattaaacatggtaagagttcagagaggagatgaatgaggaatggaaaaatcagagcctcttggaaaggttagcagttacatcttgaagacagtgttagggtttggataaaaggacagaagggaagaggttattccaggtaaaaggggtggataaagtgaaaactgaagtgagagcaaacatggcagccctagaagacagtagacagacctttcaagattaaaaagcctttggggacaaaatctattgctaaatcatagagtccctccaatgtcaacaggaagagattgaacttgattctaaagtagttgagggagccattagtagttattaaacagtggactgacacactgggaggaatgttcattaaaaagttaataagggtgggccaggtgtggtggctcacgcctgtaatcccagcattttgggaggctgaggcgggcagatcacctgaggtcaggagtttgagaccagcctggccaacatggtgaaaccctgtctctactacaaatacaaaattagccaggtgtggaggtgcatgcctgtaatcccagctacttgggaggctgaggtaggagaatcgcttgaacccaggaggtggaggttgcattgagcggagatcatgccattgcactccagcctgggcaacaagagtgaaacctcatctcaaaacaaacaaacaggttagtaaggatacttaaatctggcagcaaagttcaggacagataaagagggggataccaactgtgctgcagagccctcacttgtaaaaaggagcatttgtgttgtggtgtttgagtaatattcctgggagaaggcagcctagtagataagctgcacagactgatgaatgtctatagatgacagctctgaagcccacgtagctggttgtgttcctttgcccaggagtgccgggaaggaaaatacatagcaattatgactttccttttggcacaaacctgacaccatttccattttccatttggatgcaaagctttgaacatttctaaattacagactttccaggcagccctccttatagacttctccctacaaatgagcgacccagcacttaaagtttccctggcatatgctacaatgctgcaagaatgctgcaaaccatcatagacaagtagcgattgattaaaagaaaaagccgccatgagtagaataaatgtttacagaccccaccagaaggaagttccgtacccttcagtctgacaaaagttttatctcatgaagtgatcctctgtttccatggatttgttacctttggatagatttccaacacttacttgtcccttcctggaagggtctgagatgtagatcatccgtctcctgagaacacactcatttggtaaaccattaggaaattcattcttaggaaacagtggttggtaaaaggcagacgtaagagacaagagccaggcactgttctgggtgcactacaaatacttatttcatcctcatagcaaccctatgaagtagatatgaaggaggaagctgaggcacagagaggttcagtaatgttcccaaggtcacagagtaagtgacagagttgggattcaaacagaagcatctgggctcccaagtctgtgatcttcatactgtactctgccatctcagtctgatgccacagggtcaggttgaactctgactcttctctccctccaacatcattagagccagatcttggctctttttttatcactgctctacattcattgcctaattcacagacacttcttgcattactcttacagaaacctcctgactgatcactctagttccttaccctctggtcctcctcacgctggtataagacttgctgtcctcaggcccatctgagtcacaccacttacctaacacttgaacagggctccccagcaccttcagataaagtccaaatcctgatcagagcatataagggtgcctatgaccttcaccaggttcctcaccagccttccactgcatctctctctctgaactctgaatcctccctagcctttcttgtctgtccattcctttggtagcacttactgaacacctcctgcttgcaggcagtaaggacacagaggctgcctttgaggttggcacagtctagggaaaatcatgaacatacaaattgggtccacagcccttcatccacaaactgaaatccagaaagctctaaaatccaaaagatttttcataactcatttagggccaaaacctgccctaaactgcctcaaagttacgtatggtctttttgtgtacatattaatgtgtttgatggtgagatgctgtcccagaccctgatgggggcattacaagatacatggaatgtgtactatattattcaaaatattcttaatttcaaaacatatctggcctcaggtctatcagagaaaggaccttggccctgtcgatgcaatccagggtgggaaattcagtaatggaagcatcactcagggtgcttaggcagccctctggcaggactgggtttcatgtaaatgttaaaaagaagcaactcatttcttgctagtgaaataacctattcccagctgcagctgctacaagatatgagaactcattcaatgtttctcaccaccaaagaataaagtcaaaattccttaacatgatgtctaactctgtatatttctagccacctttacaaccttatttgtaggaactcctccccacacaggactctgagcttcataaaggcatagatcaatttcattcttctttgtggtcataatgtaggtcagcaaatcacagcccatgggccaaaactggtccattgcctgtttttgtaaataaagttttattggaacacagttacgttaattcatttgtgtactgttagagctctatcaagctatagtagcagaacttaaaagttgcagtggagaccatatgtcctgcaaagcctgaaatatttatctggccctttatagaaaaagtttactgactcctgttctaatgtacactccagcatcaggaactcgaaaattattgattcttgtcctaggttcttctaaaagcccagctgagacctaagtttataagcaggtagtttatttgggaaatgatcccagggatcaagagtgaagggtgggggtggtgatttggtcaagtgttattgacttggccaccactgcaggccactggtgtttgaccccagttggggcctttggagaaggcttatgacatgtgtctcagaacagtgtgcccagggtaaaccggggaagccactatccattggcctccatccttcactaatcaaaggtggccccatagcattaactctcctccacttctgagatgcatacatgtgagtattcttaagattctgaacacttgctgcagcatcagagaagctctgggacaggaatcaagtggtacaccatgcaggcaagacgtgcatcatcccattgcagtgggggcagagatggtcaagtctgtacagagttggtcactgcaacagtggttggagtcagagttgtgctgagaggatgtgaagaggggtgtagagttgcctattatggtctgaatattttgtgtccaccccaaaatccatttgttgaagtttaatccccatcgtgatggtatttggaggtgggacctttgtgctataattagatcaagagggtgaagccctcaaaaatgggattagtgcccttataaaaagacacacagggagagatgtggtggctcacacctgtagtcccaacactttgagaagccaaggtgggaggatcgtttgagtccaggactttgagaccagcctgggaaacatagtgagaccttgtctctacaaaaaataaacaaaattagcctggtgtgctggtgagagcctatagtcccagctactcaggagactaaggtgggaggattgctggagcccaggagattgaggcttcaatgagctgagatggcaccactgcactccagtctgggagacatagtgagagcctgtctcaaaaaaaaaaaaaagagagacagggcttccttcctctctctgtcattcactatgtgaggacaggaggagatggccatctttaaaccatgaagagggcctttacagggcactgaatatggtggcaccttgatcttagactttccagcccccaggactgtgagaaataaattctgttgtttataagctactcagtttatgatattgtattttgttataacagcctgaacagactaagacagtgcccaatacattgattaatcaaataataagtagcttatatttattgctaaccactatgctaaatgcattgcatgtcttatatatgtcttatgtaattctcataaaagccctatagaattttcactatattattcccattttgttcataagagagctgatgtttagacagttgatgtaaagtaatgaggcctgggacttcaactcacttctgcctgactccaaagccctaatcaccactaagctacactgactaagcttgactcccctccccacagctcctgcccaccttctgcctcagtaggtctgtcaggagtaggacagagctcttcctataaccaggggttggaggtctacctgtgaggtgagatattgttccccaagtgaggaaactaaatgtcacttagaaaatggaaaacaagcccagggaaactggcaagagaaagacttgttagtgggaagagaggatgagtattaagaagcaattagctagcactcataatactttgtaatttcgtagggctcactaactctttttatcttcaaagaaagtaacagaaaaccacatgcaatgactccgtgtgtgatttagaggaaaatggcagggttaggaggatctgatgtggctggggcgaagcttaccccacagtttttctggcattaggtagcaagaggaactacaggctcctttgttgtaagtcagggtggttttacttcaggcagcctagaacctcaggaaccctgaccagggaggaagcaaggagtcaacagaaaagggactaggaaacccctgaaccagctaaagtgtcagattcttgggagagcagttggaaagaccaatgccatggctaaatgaaaacatgtgcctgattaggaagactcagataccccagaatctgccatccaacaggtggaatccagatgccagaggttctcgggatgccagtgggagcatggctccaggggatcagtccaatggcagcagagtttcattcaacagctgggatcccaggtgcaggatccagcccccaggggagaaaactggaaagaattaaataggaagtacaggctgccgaggaacaggccctagacagagctctaggcacagcagtaaactgaagcttggtgggaagactaaagcactgccagattgcaccaacatcgtggggatcctgggattgactgcaactttgttggcatgcaagaacacatggcccgccctatttgtgagctagcaccaggtctatggcagcaagactagttccaatcctcttccactgatggagtgggagttgccaatatattccctgccctggtcaagttgggatcaaaacggaatgtttcaaccctatgaacatttttataattgaggttaaattcacataacataaaatcaaccattttaaagtgatcaattcagtggcatctggtacatttataatgtgcaaccaccatctctacctagttctaaaacatttccatcatttcaaagtaaaaccccttattcattgagcagtttctccccattctcctctccccaccccagcccctggcaatcaccaatctacattccggctctatggacttacctattcttgatatttcatataaatggaagcatacaatgtgtgaccttttgtgtctagctttttttcacttaacataatgtttttgaggttcatccatgttgtagctttatcactactttattcctttatatagctgaataattccccattgtatggatataccacaatctgtttatccctgtgaacatttttaacatgagatgatcaaaggataaaaatgagaactttgggcaacagtgaaaaagtatcatggtattattcctacattaacttttcagtccctatttttttaaccaggagataattggcatgttgcctcacacctaagtcccacaccatccataggaaggacagtaatgactccaaacaagagtagaaaaggacaaagaaatggttttacacctactttgtctttcagggtcacaaagtatgaaacagcctgtcccaaaaatgggttgattagatctttggacacccagtgtgtgaccacagtgcaacaaagtcatatacttgggcatttgttccttcatctggaagaagcgagggcagaagccacctgaaggtcctcagtgctgtggaagatggcattcctctatagatgctctcctgctctaccactgttcattctcaattactaatcaaataagtgcacctgagttatttacctccctgcaagcctgctcacaacaaagaatacccaacctaaagtcagtgaacaataagattgcataagaagaaagaatgtaccacactccctccataattaattattgtgggctgatttcagctacatttttccttgggcattttcctaacagttcatatttaacagtccctggaagccaggaaaacagaggagaaaaagctcctttatgtcttagttctatgctattcataaatgaaaatcattgttaatttagagtttgacagctgtggtgcacttgtaagtccagggcagctgtcatcagcactccagtttatttttcaagcacatgtttaatttgactttagcgctattgccagttcttaaggagaaagagggggaagcagaaacagaaataatcattatcttcatcatttggtttcctttcaaaatgtaaatcggcatgattaacaatgatatcagaattgctctaattgcagttttgggtgcagaactagttagctatcatctcctacatggtccaaagtctagttttcttttctttttttttttcctcctaaagtcagagggtgttttgtggtaattacacgcagactctgaacaacagtcccagctccacagaaaagccttccaaagtgcagaagaaaatcaaaaatcaaggaatggggaatgatgggggtgactaggccacaatcccagatgaaagccacaggctgagtcttgtcttgtggctctggaatcaggaaaccagcgagagcaatcagagcccttggaacagcagccaggatctcccgctcttacatatctaccatgcttctgcggccaggcagctggctttgtacaggctcacagtgtgcaaatcggtctcaaagtataaaattaaacacatctgtagctccacgtagaaatctgatgagtcagtatgtacttgatcgggcccactgttccagtccacgttgcttggaggaatcttccttcgcaccagctgtgatgctagctaaacccacttcctggatctttcttcaccctcatttttatatgtgtggcttccggaggtctcacttggcctttattttttgccatctgtcatgtgtccaatcacaatgtcccaaagaacctctttgacattgcctctgtagtggggacagtagatgcaataacacactcctatctttctatttgtttctttgtacattgagatgaaagactgccttgccttcttcatcagtcaacatctcgatatgtgctatgctaaaaaagatcccacccaaaggaaaactttggcaaatgtcctggaccccagctctgaaattaaagtttgatagaggaacaatctacaacttcacccttctagtgccggaggatcctctagacagaactaaagatgtagaccctgaggggcaagtctgactcctaaaagggtagtcttccgtctttttaaatggaaagtattatttgtagattatgagatcagaactaattcttccttaacgatagaaagaccaggcttctgccaggttaacgtcccaagaatctgtgagaatccttagggaattataaacatgtaccaaaaactactggctgttgcttgttgcttgccaccttggccatccacctggggctaggctctggatctgttccgtgggcagctcctctccctgcctttgcctcaagcttggactccaggctgtccattagtacccacattatggttagggccaaacagcaatggttaataagatgttgaggacttggggagtgccccaaagtcctcacagagatcctacataactggactaagggttggctgctcttaggcccacgagcccaagctcatccttagaggttccctgctctcagctcctggcctgtctcacacaaggtgggcaccaggctgcctgcctaaccccagtggcctctttacttctccttcaaagattacccctgtacaagtcccaggttgccccaatttccagacctaactcccctccacactagtttgcttagcattgtagttaagaaggtggacttccaggtcaagtgatctgagattgaagtctggcattaccacttactaatgacgttaggcaagtcattttagacacccagtgcctcaggtgcctcccccataacatgggggtggtaatattaatagtatgtacctacctcatagagttgctgagaagactaaatgagttagtgcatgtaaaattcttagaacacttcctggcacagaataagctctaaacaaggctatattattaatgttgctgttattactattgctttacatttgcaataaaacaaagatcatcatgtagatgtttcctaagacaaagaagtggtctacccaagaagtgaatttcagtttctggtacttaggacaaaaactgtacattttaaaggtcgtttttcaagcttcaaaaactgtttagtcacactggatctccatttcttttacttgcttgctccttgccacttcccataaagaatatgaagtggcattaagaaaaatataaaacaaagtggtcgtgttaaattaaaaaaaatcaagaccagggaaaatcaacattaaaatataacatcggctgggcacggtggctcatgtaatcccagcactttgggaggctgaggcaggtggatcacgaggtcaggagattgagaccatcctggcaaacacggtgaaaccccgtctctacttaaaaatacaaaaaaattagccaggcgtggtggcgggcatctgtagtcccagctacttgggaggctgaggcaggagaatggtgtgaacctgggaagcggagcttgcagtaagcggagatcgcgccactgcactccagcctgggtgacagagcgagactccatctcaaaaaataaattaattaatcaattaaataaaatataacatcaagacaggaggaagatctaaagcatgctaagggctctaaattctcatacacttataagagcactggattacaacccattaaataaaatggaaataaactaaataatataaataatataaataaacacatataccagttaaacaagtggatggataattggaaagtttgataaggaacaggaggtttctataatctcaaagtacttgcccttgaaatacttaatcactaaaaagggagaaaagcaagaactttagaatggagaaatctggcagccacctgtaatgtgtgccacctgataggatgcaatgagaagaaaacgacacagtgccacttctgtgatattcctgctagagatgcataacctgaatctaattatgaggaaacatcagacaagctcaaatattttacagaataaataacatgtaatcttcaagtttcaaagtcaaagactgaggaagattctagattgaaggaaactaaagtgacatgaaatctaaatgcaacactgtgattctaaactagatatattatctgcaacagaacaattgttgaaatgtgaatagggttcgaggattagatatatcaatgttatctaatctcatggttatattgtggttaaatgggagaatatctttgcaagaattacacaaaaaaagtacttgagctgatcagcatcatgtcaaccacttactctcaaatgcttcagggtaaataagttttttataccgctcttgtaagttttctttaaggttgaaatggtttcaaattaaaaagattcagggttgccagacacagtggctcatctgtaatcccaacaatttgggaagctgaggctggaagattgcttgaacccaggagttcaagaccagcctggaaaacgtagtgagaccttgtctctacaaaaaaaaaaaacaaaacaaaaacttaaaaataaaattagctgggcatggtgatgcatgcctgtggtcccagctactaaggaggctgaggtaagaggatcactggagccaggaagatagaggctgcagagagccatgattgtgccactgcactccagtctgggggacagagtgagaccctgtctcaaaaacaaaaaaaggactcggcaaaatcagggggtgttggggtggagaggaaaaaagagctatattgacatctttccttccttcctttttttcttttctccctggcttttttctctcagaaggttgggccaagattttgatgagaagacactgggttcaatcaggaaggcaggcaaggacttgccagacctgaggggctgagctgagttggttcgttcagtgatccttcctgtagtgtgtgtatactaagcaccttcatcacatcccaagtgccataccagacagcaaggatacagagctgagcaggatgcagcctgtgtgaccggagactcgcagagtggtgggaaatgagccagtcaacaggcagcaacctcatggtgtgaaagggcctccccgagagaagcacagggcggagttgggcaggtacccatcctggttgagggtggtgaggaaggtccagacagcagtggcaaaaggcaacagatgaagggaagcagcggaaacagtgtgggattgtccctagaccagagaaggcaaggaacattaggggacctgcaagcaggtggagcaaggaggactgtgattggggcgaaggtgaggccatggtaaggagtgggtgctcaatgaatgttcctctttttctgtactttccttctcttctttatcgcttcctttgccaaaacatcccttctttgagcattcagctgggtattgctctaattttttaatgacagtaacaattgctaaaatatgtgcccacaatcctataatgcagatactattatttcctccattttacagagaagaaaattgaagcacagcttgctcaacatgatatagctcataagtagcagagctgagatttgaaccctggacagtctaactgtgtagcccaagcttttgatctaccacaatgccagagtacatctttaacaaggctgaatcctcaggggattatgtcttttataaagtgtcttgagggcctcaatagttctataactagaggggtaaagggagtggggatcttacaagctgtgtctgttggtgcatcttacccattccagccacctcccctcatcccactcactgccttttcatgcctgccctgttatcagttgtgtgggacctgcaatgggtccagggacacaggcagcctgggctggaccagtgagggttttacccagggtggctgcagagtcagcacagctcatagtggaggagggaaacaaagggtcaaatcaaagaaggatcaggtccaaagggccctcagggggaaaggctgtgcccagcaagaaactgggcacaaagttgggtcaaggtgagctgttcgggatggaaactgaataaagcaaagtcaaaatgtaaaaggtgaaaaaggctcttttgcatgtggtctcaggcaggagggaatgggaaacatactttccaccaccgtagaccccccactaccccctcagggctcaattatttattggacaaatatttagtgagcacctactatgtgccaggctaatgctaggaactggggaggaaaggagaaaaaacaaggcagagagaccagaggggctggcacatgaatattcatctgagaacctgaaatgccaagctttctttggaaccaggctgcatttccattttccctttagcccctggaacaaagccaggaagtgacagagttactggctggggaagagtgtgggagggagggaagagcaagttccccccagcagccgctgccacagtcatttctaaaacaggtttttacagaaaagcctggttattccattattcctctgcagccaggaaaaatccccctttccacacctgcctggtgatcaatacagatgcttctgctaattgtgttgtcaagaaggtccttgactggttctaagcattctgttaggcaaagcttcccccttgcaggtgggttttagggtcagacaggtcaaggttggaatcctggctctacccagtctgagcctgttttcctccttataaaatgggaatcaggagcaaaggcataggaagtacccctttacatttttaaaagtaatttagggtttgcagagcaccttccgctctacccccccaactacttttgctaggtcaacatcataataattgtgagaaattgaagctcagagaggtaatgtgatttgaattggatcacacagaccctgagtataaatgtcaagatatagaaactcggccttcacttttaaaatagaaatgatttgctaggcttttgtacattttcttttgtgatggtcaaaatctactgcctaataccaaggatacctacatactatctaatacccagtagttttagctgggaatttccttgacaaatggaaggcaggagagcccagtggagaagggtatgggttgtggagtcaaagttgttgggctcctaatcctggactacctcttaacagctgaacttgagcaaggtacttgatccctctatacctcagcttcatttatttgcaaaaggagtactacctacctcataggcaggagaattaaacgagataaccagggattcttggccctggctgcatattggaatcacctgagcagcttttaaaacttacctgtcctttggccccacctctggaaattctgatctcatctgtctggggtggaattagggcacccaaatgattctaatgagcaaccagggctgcaaaccctggaactaaataaaatgtctactacagagtgcctagcacatcacaagcactcagtagatgctagttatcactgtcatactggttggtgataaaaccaaggcatgtgggccaacactgatccattggtaccaacatccagtaggtcccagttactgtgccatgcactgtgggtagatacaacggtgaacaagagtgagtctctaccttataagggtttcattaattctctagtttggtaaaaaaaaaggcataaatatgagaagttataataaatagtgacacaaggtttaaaggagaaggaagaaggaaagataaaatttttcaagctcctatctcatgctaggcactttctacaccaacgtagttcattaatgcacacaggagccctataaagtagatattaagctcaatttgtgggacagaaaactgatgctcagggaagaaattcacctacacacaaaacagctagatccagaataaaattttatctgcctgactacagaggtctttctattgtaccatgtctttagcacactgatttcatggtgattataagaacaagtaataagctggtaagaattagaatgtagaaggttcaagtccttatgtgtgtgtgaatgtacacaactatcatctatctgtcattctatgtatctatcattctatccaattatccatccatccacctatccagtcatctaattctgttatccatcattggttgtaaaattagattttcagcttaatcaaatatttcagttaataggtcaagcttttaaattactcttaattaattctccattttcctgcataaaattaaaatattagcattaagccaaacaatatatcacttccagtaaatcatggaggaataggattgctgatgttattctttaaagtgtgctaatggtatcagactatttaatgtagattaactaccaggcctaaacagtaatacaaatagaggaaaacaaaattaacgtgattaaatacacttggaggctatttagtcaacagtcagattgcagacatttgcagctgcagctccaaaagctggttctcttctcagctgtcactaattaatgcgattttcctaataacagttttctgatagacagacagcatcaaatcaaaacaacttcatttttatgctgatgaggcctaactactgcaacaagagcccaacagatgcaaatggcaatgttgctaactgcaggcttgcatgtggtcttaatcacacacaagttgaccatcagtgctggaagtttattgcacaaatacatgggatgtgggagagcttggctagttacatcgtcacatcagccttggtagtactgggtcacagtgggatataccacagctctaggagaaaagtgctctagacaattgtccattgctccggacctacacctgtgtaagtgactcatcttcccttaatttgactgacacttatttttcccaaaagacagaattcaagcaggccggttcacatcattcaatattcagaacccttgctgggcagggtcagcaggaaggcaaccccaaaatggccagcatccctcaagtctaatatggatgactttggctcaggcattgatccctggtgtaatcaattgcagttaatcggtttctccaaagcatgttacataaatcataaatatttatggatcaagaaactggtttacatttcctaagaagggtactagacacatggaaggccaggatttactaccttttctactgacaaccagtacaatagcatcgcaaactgggccaatcagtggcatttgacctctggccatgaggaacttctggtcatctctaggggagcttgaacagagaagaatccaaattggcaggagagtgaattgtagattttcaagaccatgtcagcccagagaaacactgtacatattgatgcctttggatggagaggcattaaatacagtgcaaaatgttattaccaaaagattgttgccaaatatcctccgaggataagaattctgctagttgactttcttgaaatgcatctcactttataatagaaacatccttcacatggagatatccagaaagctagggaaatgtacatcttaatctcatggcccagactcatccatttacaaacaaagcagtgaccaggacaaagaccctggaaaaagtttgggcccaccacactgtgagggtccagctccagggaggtctgttgtgctgcaccatggaggtggcaactacctggttttgctcttgttcccttacacagatgaggagatagagacttccccctccttccctctttttttcctctcttctcggtgatttctacctatcctactttgtaaaggttttaagtgttttcaagggacacattctctgaagttcaactccctcatgtctcccagatgtgcaacatggaaatgtacatgttacattgtcaaccttaggatatagatttttacttatgtattgggttttaatttattccttgccaacttgaaaacaatttgcagtaccttgtttcacacagacgctccagaatgattcccaagtctcccaacataaacatgagtggtttaccattaaaataaaaaaaattcatcatttacattctgctctgcattaaaatgggatcacattaatttcttttccacattattcactaagaaaactagagttcttggtttccttccttccctcccttcctcccttccttttttcttcccttctcccactcttcctttcttccttcctttcttgtagctgaaaatatttctgtgagaaagattaggaaacaggacagatcatgtccggattttgtagcttacatatggtctcatgctgttgccccagaactctgtgagggtccaagatgactgtggcttacgtctgatgagcttatgccacataaggatgaggtcagatgctacaagaggggcacagacattgaaaagaagaaacatggggcaactcaatggatgagcaaagttgaatgcgttgtgcagtcagcaagtgtcttttttataagaaagctctgtgcttggtttcacctcctggtgctggacataccatcatcctgctgattcccaacattgtgaagggattttgagttcagcctccgtggttccttttgagaacaatggttgccatcagccaaactgcctagcttggtcaaaacacagaaggcataaacagcctttatgcagtgggaaatgtttcatgattcagaccagtcactgtttgctgatcacacagcactctgggtggcactgctaatacagaggagtttgtgcttcttgccagattgtggacatatggcagacactcaaaattatgtgttgaatataaaagagttgaattatggggaaagtcagtgtattgaaaatgtatcacatcagcacacctgcaatgtttcctgtaggaaagctcagtgccaaatgttagagggtccaccagggaataacaaggttcctaccctcaaaaagcttggaattcaggcagaaatgcaaaatataaacatgcaataaatcaaaggataatacaagatattaaataaagttcaagcaaacatcaagagtacccaatgcctgaatgccaaatgaacagtaacaacaaactgtgttctagaagtctggtggagggacaggtcacttctgatggtcctggttaatgcggctctgaggaggaagtgagatggtgacagatgattgggatctgacgaggcagagaggagggtagaagtgaggaggagacatgtgacacacatccacacagtaaagctgaattcaggtacttggggaggggggtatcagacctgaaaggtggcttgcaccccagtgttcagaattgtggatgtttagccaagacttcggactataacctgtaagcgagagaggagcctttgtttagagaggacctactgtgtgccacaccctgtgctggggtgtggtagaggttgggggtgggataattaggatgtggtgccatcgttgctaacaatgtgtgaaagaaagtgataatgaagaggtgatgatcagtcccctggcagagcataggtaaatgggatgggttggcaaggacaggagaccattaggaggttactgcagtaattaaccagaaaatccttcacttaatcttctgtgtgtgtccttccttagggtgaggtagaggggagtcaggtgggtactagcaggcatgaaaatcaaggcttctactttagacagctgctcttatagaatctctccccaaagcaatgcacatgcttacaattttgcatatactttccatacagttttttcaggggttcaaagatcctctggaaccaatcatggtctatgaggtcctagctgagaacagtgacccccctcccacacctccaaccccacctaaagagcaagcatctcccaacagccagttctactactctacaggatgctcccatttccacagcagaaaacctgagtgagaggaaacagaaagaaggcaggtggcccgccctcaaggaccttgctctgtcacctggattgtttccttacacctgagaggacagtgctcttgcagtcagccctagtttgcaggaacccacagaagcgggaggaggctgaagccaaggcaaagtgggacgaactgcggagagtaatgacttgcatgaacccagccaagagggagcttgcaatgtggcagcatttcctcttccttagaggctggggcgattatatgattacacccacgcccagccacggagcagcaaggactcagcacagaacaccggagaaacccaagagcaacacttcactttctatttcttgttttccagctgagacaggttctattttggatcagagcatagtctggagagaaagcagttgaagtcttgggtgcttggaataaaaatttgaccttaatctttaggaaaaaagtgtatatcttagttggaatattttattaaatggaatgacattcatgcccttctgcgtatctactgtcatatatttcagacctaatggtgattcttaagctttgtggggtcaggaacccctttgagaagcagatgaaagctatgaattctgactcagaaaaatgcacttgtgcacatcaaacaaaatttcatcatcctaaaacctgtctgcaaaccctatgttaagaactccaggtttgataagccttggccagatcctctgttaggtcctaggaatgcaatgatgaataagacactagtccctggactcaaggggctctgagtttaaggaagtgttgtttatagatgtgaagaggttggcagggagagccagggaggtcaccgaatagcaagtgaactgtaagaggcattaatagtcaccagctaaacaatgtcatagagacagcctgccagttgtcccttgactagtaataccccaggtaccactaatcaattgcaaaatgctaagtaatgtgctaaggctgattgaaaaataaaagtaattttttagtaacatcaaactgaaaaataaaagtaatttttcagtaacatcaaaccccttgttcatgtgttattaagagaaaagattttttggcttaatgatgtatgtgagatactgccttcaccccaggctcagggattagacaaatatctctttgcaaggttaagaaataccatggataatttcaaccagaggaagaaaaccattaagggtcaaaagacgctggaaaaaaaaattgatagtttggtttaaaacaattatagaaaatgagaaatagtcctgttaactatctagaattgcctgcctgtcagagcttccacaaccgggactacctcctgcagcctatttatttcattcatatgagttgaagagttttccaacagctgacaaatttccagccagtgatccagcaggtacccctaaggatttccgctctttcctgagcttcaccttacaggcatgtgaaagcttcctccagagagaaaaaaagtatttcccttgcttgtgttttcctgtcaaactcctactcacaacccccaccccacctttcctttacagccacatctctgggatgtaaacttgaaggcctgacccagcacagggaccctctggttcccaaatccaaggccttcttataaggccttgtccacagctgtccctcttctccctcttctcagtctcttctgatgaagggcatccctgcccctcactcccaccaaaaaccgtcagtgtgggagcaatagctcacacctgtaatcccagcactttgaggggcctaggcaagcggatcacttgccaggaattcgagaccagcctggacagcatagcaagaccccatctataccaaaaaaaaatgtaaaaagcagccaagcatagtggcaggcaccagttgtcccagctactcaggaagctgagccaggaggatcacttgagtccaagagattgaggctgcagtaagctgtgttcatgccactgcattccagcctgggcgagacagtgagactctgcctcaaaaaaaacaaaacaacaataaaagacctccaacagctccccagtggtgcaaccttgtggcctacatatgggaccagacagagcctgactcctcctttcctctgaactgccctccctatatcccaccatgcctctttccatcagttaggcacacatttaagagcagcattcattacaaaggttggctgatgatggcttcaacaaatagaggtttatttttcccataccacaagaagccccagggtaagtgactgctggtattctttcagcagctaaatgatgtcaaggccagtgtctttgtgattcttcttggcctttcttcatggtagcaaaatggcttgccttgttccacacattgtgtttgtaagggaaagtccatggtgggtcatttgtttttcttacctgggaagcaaaacttcctcagaaggatctcttttaggtgtgcagctctactgcgaagttcctgtccctggttttacagacttagtctcttccatcttgcaaacttcccgttatgttactgaggccacatgtgggtcacatgtcctaccaccagcagcaaggaaggctgggaaagcaggaacaggactatcatgactggcatgtctgatattaccccaaacaaaatgacagctctgcaagtggggaagatggagggaatggatgctgggtagacgccaggacttgctgtgcagtgttctgattcaacagattacgtcactctcctgtcaggtgggcaactatttggtatcacacaaacaatagcttattcatctttgtatctctaagtcctaacacagctttgtggcacttactctgttagacaaacttatgagtaaatgaatgtctgtctggttttaatacctctcacatctaaagtagttctttttaaaacacaatccagttttattcttgtctttttatatctcttatatgaaaatcaattcatcattagttttccattggatttgggcagacgggtaagttgtaaagtgctagagtaatggtattgacaagttatatgatgaagttgaacaatatgagagaaaatgggatcatggtaaccttgttatccctaggtcagtttaactattgaagaggaaataaactgagcactaaaactagctttcctttagtttttattaaaatcagaaccagggctttgtagtgtaactttgtgcaatgcgaattgagagcttgagaaatccaatgaccacacaagtttgggaatgggttgtagtcttgttaagagcctaaccgacctcttacccaaattctggtaataatcaaagctgcacatgggtgtgcagcaccatgtggagctgatatctctgattcaggtcgagatgtctgctcagagcagagaacgttgtttccaagggccacagatggtgggcctgccaagggtctcttttaggtgtgcagctctactgcaaagttcccgtccctggttttaaaaacttagtctctaggactccaagtccaactcctgtgccatttttccaagaagttacacctggtcaacctcatttctaccaacactttccccaactccacctcactccagccagaaatggccaccctccgctgagttgtagcacttgtagatgattgtttgattgggattctaacagatttgtgttgtgagagtcattcgggtatgttccatcatagagagtgccagagtttctttagaatggcatgatctagctttcatctaaccttattgcaccatttggtacccagactcaagcccagtgaattgtatcaatgtcaatatcatggttgtacaattatacttaagttttgcaaagtgtcaccattgggagaaaccaggcagagtacaatcactttgtattcttttttacaaccatatatgaatctacaatatctcaataaaaattttaaaaataaaaatatttctttctaatccccctgtcttttgtgtcaatcctagcattactatgtctccctctagtcattggtgttcgtacctaggagtcagttcccttacctccctctatctcagttttctcatctgtaaaatagggatgatagtaatgcctacctcttggttggggggattaaatgagttaatatttgtgaagcacataggaaggtgcttaactgttaaataaacaataaataaataaaatatcttatgcttaactttctctttctgccttagatccaatatgctataagtcctgatgaattttcctaccatgtgtctcatagagtctctatttcccatgcccctttctcagttctgaccttcagagccgccgccatcatctcctcctcttgaagccttgccattgtgaagttagtcacttcacctctgcctcccatggctcctccattatcatgttccacattgatttccagtttcctttttctgtttatctcttttcacccactagcataggagctccttgctggaagtcatcgtttcttattcctctttgaagtttcagctcctaacatagtgcctggcacaaaatgagtgttcagcatatgtttttgagtgagtgataattaatcaggaataatctcatttcagctactggaattgcttttttgcagtcatggtagatgacctctgaatctatagctttgtgaccccaagcagagactgcagccttaccctttaactctatctacaagtcatggagtcttgtagatagagtcttgtagatagagtcctgcagataagttttcacttttcttctcccatgggcccactgtcttgggcttcctggatacttgttaactcttgaacatacctccatttcttgagacccacctaaagccatatacaagattggtgagtgtgcatcctggcatgtacacagcctttggataaatatgcggccatcgttcagttagcccttggcatccttgtgaagtaaaataagggagacggcctcagcatctgatattatcattgcagtgacttcaatatttgattcctgggtcatcccacagttaattttttcattggtagatgggaataaatattgctggttataaactggaccaactctatggaaaacattactgagatcatagagaaattttataaagtatttcaagaaatattcagtaataaggattttactggaattgggaagaaggctggcaaaaatagtctagagaccacaaacccaaccttcattttggcaatttattgtctctgtctgaagcagctgactaaggtaatactctcactcctccttccacaagcaaagaaacagacctgacatcaatcataaaaacaactactgtttattaagtacttattacgtgccaggtactttttgttaggggctggtgacttaacagcagcaatgataatgaccaccacatactggatatttaccgtgtgcaacacaccacagtaggaacttacatgaattgtctctatatggctgtgacacattccctgaggatccaggtatattttttaagtcatttcatgacctgatttctcccaagtacttcagtttctgagatctctctctcccgggagcagggaccccagccccttttagcactagacagcaaacccacaacttcacaaactctaacttcaccccaacaggcagattccctcaggaaaaagagtggtaaatgaataaaccctccaaacagaaaagggctgagcacctaagagattcaggatggcatttttggaaatgttcacttcaggttgaaaagaaaacttttgaaatgattagtgagttatttagaacctcaatattctaaagtttgagaagataacatactgaggaatttaatttagatttccttaacatgctctcttatgataagagagcattcagtatataaatgctatgcaacagtactgccaaattgcaacacagtatgggagaaatttgtcattttgaaatgctaagggagttcttactaacagctttctcatcttgtaaagctattatttttctgaatgataatatgatttataaacctcagctgagttttatagttttgatgggaatagactcaaaatgcattttctcagaatataaaattctctcaggagttgaccaaatgaggaataaatagaaacttccgcaaccaagtgtaccaaagtcttggtctccactagcatctctgtaggtgaatgttggtcttcctcagggttctgggctcagtttgactctcactctcaactctgcacgctttccctgggtgacatcagccactccaaatcctttgactcttacctaggccagcaactcccacgtccacactcccattccctcccagctttccagagttacaatgccctatgtctaacgacccactagactgcccaccatcacaacctaagccacattagcctcagattctctcctgtccccaaaccctgttccttctcctagaacattggtagtagaatgatactaacatttggaggaataaggtacgaatcttggaatctagcacaggagactgaaaagtgaataggtaacaacagaactcagggaggataaatgaaattcatacataatctaacctttttttttgagacggagtctccctctgtcatccaggctggagttcagtggtgcaatctcagctcactgcaacctccacctcctgggttcaagcgattctcctgcctcagtctcccaagcagcatgggccacctcgcccggctaatttttgtatttttggtagagatgaggttttagcatgttggccaggctggtcgcaaactcctgacctcaagtgatccatctatctcagcctcccaaagtgctgggattactggtgtgagccacagcacctggccccataatcgaacattttactgcagaatattgatgtgtttgattatagaggtattagtggtatatgtacaatcttaactttctgatatctaaaagtttctgaattccaaaacatattccagaccacgggttttgggtgaagaatttgaggacctgtcatatataaagcataagttatataaggtaataatgtatattaagtgcctccttagtgcagactagcacatagtaagggctcagaaatgacaacaattattaaaaagaggaaatgggttgccttagactttatagaatattgaggaagctgagacatcttataggaaatacatgtttttcatctctagtcccccaaaatttttataatcatatatttcaaaaatttgagggcaattacttttctatgcactatcatgcttttaaatgataggctttgccattgtccccctatttacagtaggaggaagaagattcagagtatttattacagaggcaagcaaaggcaggcatgggtgattccggagaggaggcagcacaggcagaggcctggtcgagttgaagaggtgttcacacaagaataaacatcgaaagtctgcaacccgggaagcttggcccaaagtgatgacagctgaagccaggacatgtctggggaaaattataaagacccttgaatattataagtttgtattttatcctgtagatgactgatttttaaatgtttttagcaagagagctttatggaaacaaaacttgatttgcatgggagctctgtccactgcagccacacaccaactggtttttactacatcctgagtgctcttttaaaagagcagatctgatcatcttagtcctctgggcacactcttcaaagatatctcattaaacttggagtgaaatgccatctccctgcaggctctgggtaatgtggccctacccatcttcccagctcatctcatacaggtcgagtattccttatccaaaatgactgggaccagaaatgttttagatttgtgattttttttttcagattttggaatatttgcatatacacaatgaggtatcttgggatgggacccaagtctaaacacaaaattcatgcacgtttcaaacatatacatgaatagacccttatatatatagcctgagattaatgttatacattattcttaataattttgtgcctaaaacaagtttgtgttttacacaaacattgagccatcagaaagcaaaggtatcaccaccacagcctgccatgtggacagtttgtggttgtttggcatcaccatcattcctaaccctaaatttatgtgctgccaataaatgttttaactgtgacctgatacatgaggtcagacgtggaattttccactgtagtgtcatgtcagcacccaaaaagttttggattttggagcatttcagattttagattttcagattaggcttgtataatctgtactacctccctgacttaccactcgtaggtcctcccatgagcccatgtccctcccctcctgaagaactttataagggatgccctctccctgtctcctcccttccacttgcctaattagctcctagtttgctctttcaaacctcagctctgccaccttttttcaggggagcctttcccagcatggttaggatgccctattctatgctctcctgcactccgtggacttccttgtaaactttaatcaaggttgtgttaaatgatcagctgcaggtttggttatttgatactttctcctactatgctgtaaactttgagaatgggtagtgtggccccatctggcttgtttatgacagtgtcctggaacctccctcaggcccctaagcagacccccaactatttgttgaaaatacaccagtaaatataatgggaagacaaatgggggaagaggctgttgtggttgaaattaggatggagcctttggctgaagcaggaatgtggggcctgggatacttcccactaagcctgccccttcccctccacagaggtcctggaggcacagagtggaaaacactctgaaaagcactgttggagatgatgggatgatctgactaacaaaaggctttgttatttggctttggggtgaagactgttattctcttggcctgaggaaactttcttttgcttcatagtcaaaagaatgatcaaagtagctttgcgtagacaggaagcatatttcattcatttatttcaacatcttgtctctcttgggtaaggaatgactgtaaaagacatctgtaggatggtcagaattgtattattttgtgcaagactagatgtagagtagatatttctttggaaagtcatcctggcctaggcccagaccatcaggaagattgcctctgtactctgtggatccatgcacacatggccccattcctgggtctgggatcatgtgacacatgcagatcatgtgactctaatactccttcagtgtggtcagctataatacagtcaaggaatccctatatctgttaaacagggtgaatggaagtgaaaattaccgtttgactgagtagcattgctgaagaaaatcagtagaagtggtccaagatcctttcgcattgtctcagttctaaatgttgtaaactttcaaattactgaaactctgggtttcagtatccaaccccttcaaggccagctgaaaatcaacaacagagtgggttaaaataaaagaagcatgtctgtgcaatcccaaattaaagcgaaaatatgtgctggccaaaagtaagtcatttttcagcctcaaaatattttttccaaattctaagatcctgcatttgacatgtttaagagggagatataacagctgaagttgtctttgttcagaatgtaggagacagttttgtctagactttcaggaaagatatagaatgacattttcagaacaaatcaaaatatatttttaaattcctttttccccttcacaaagaggatctgacatgcttctgtgatttgaatttggctgatctataaatggcctcaatagtttaacatgaaaagtagagtaaaataaaccattgagaaaagttattaaaatactgttagttcactttcttaccttcacaataaccttaccaccaaaaacaatttagtaactaatattgagtggagtggtttctaggtatgtgttaatctcttgacatacattttctgacttagttctcaccacaaccccataaagcaggtattgctgttatgttaattttctcatgaagacagagagagttggggtgactcactcaaagccacaaagccaagcagggactatgtctgactgatctcccaaacctgccttcctgccctcctcaccactgtgcttgggtcttctttcttcacagggccagcatcgtacaaaaacgcattatttattttcaagatgagggctctctgaccaagaaactttgtgaacaaggtaagaccctgtgggtggggagggggaggggcagagacatggaaggcagctcctcctgcacgatcctcctgctgcaagaattaaggcccctgggcttcgtgagttcctctgggttctgcttcctcacgtagctccgatttttaatctggctgtgtgctgtgggtaattggatccgccttaagctctaattactcagcttgattccctgggtagaagataatgtaccttatattggtgtcgtcttcttatttttgtgaaacagtgattattctgaagaggttccttggaataattcacaggacttaattaaggaatgcacaattgtgtacctttaaaaagtctgtaatggttctttggaaaaaaatcaccagcaagatcttgtgtggcacccagacaatatgggaggattttctccagagaagcccagcaggggatggggatgccaagggggtgttgaccttgtgatatcaccacattcaaggatctagtccttagatttgcaaacttatcaaccttctctccttaggttgaaggtattgtaacaaagctcatggaggctaactagactcgggggataaagcagagacctgagtttagatcaggcccaggttcggatctgcctctgccccttctagccatgtgacttaaatagataaaatagtacagtacctccttgacacatagtaaatgctgtctatagaatagatagctcttgttatctatatctgaaagcttattcattaatctactgcaaaaaaaattgaccttaaacatcggaatgtttttaaaagttattggataactaaataaaaataaaaaatgctctatatttatacagcataacaatctcatttctatttaattttgcagaatttttatttgcatttagagcaattagtgtttggagaagaaataatcctctccaactatagcaaagtataagctactaagaaaaagaaaggttgataaaggtcttcggggaaaacaataataataggtaatatgtttggggtgctttgctacgtgccaataactattttaagcacttcatatgcattaattttataatctgcacagcagccctatatggtaaagattattattatatttttattttatggatgaggggcctgacacaaaaaatttaaatagctttcttagcatcatatactcatggtggaaggctgggtttgaagtcaggagccaatgcccttaaccattgctttctagcaaagcaactgcttcccagttcagtagttcttatcattgcctttgacagatcaatgcattgtcctcctgtagatgagctgagcagaaactaggtcccctgtttggaattgtttagagaacatggcaatagcaaaggagagagagagttggataccttgcattaggatcatacctcccagaggggctggagagctggaatctgcagtccagagaaccctggccagcttccacatggacaccaccacacgtgtcttctgaggcttttcttttttgtgttcaactgcctgcaagttcactcagcctttctctacacagggagcatctccacttattaagctcttggttcctcaatgacaatcccatccctgctgtatcttcatgtgatgagatccaggtgctgtggtggacttgtgggtgttttggatcacacatttccaagacacctcttgtaaatgccttagacaagtcttcacataacatcaggattgagactttgggaagtgcacattagttaatgattgatggcagtacatgagggtgtcagtgaagtatctcctaagaaccctcagctcctgaaaataaggctgtcctccgacagtcaaactgacaaaaccacaccacagtgcctggggagaagacctagagctgcacagatgaaaagcaaaggcaaacaatagttttaaaaagcaagataaacaataggttacttccaattaagaacagagaaacaaaatattcaaaaaagtgacctataacaaacatatgcatacacatactttatttttttttttttagtttttttgagacagagtttcactctgtcacccaggctggaatgcagtggcacgatctcggctcactgcaacctccaacccccgggttcaggcgattctcctgcctcagcctcccgagtagttgggattacaggaacacaccaccatgcccatttttgtatttttagtagagatggggtttcatctctactaaatatgaaaagatctctgtctcacaagtaagatctaaatagagatttgccatgttggccaggctggtctcgaactcctgacctcaagtgatccgctcatctctgcctcctaaagtgctggaattacaggcatgagctaccgtgcccggccctgcatacacatactttaataccatgtcacaagcaattaaatgaaagagacaaaaaaaaaaggaaaaaggaagggaaacgcagaaaaaagagaaaaatgtcaacagaaacaggataatgagaaaaggaagaaaaagggaagaggaacaaagaatacaggaagagagttgcaaaggaagtcagtggatttcaagtagaaatggggagagagggcggctctggagatgctccatagcctgaaattacccatggttggcagaccctgcctgctgtggttagaagaggagtaagtggacgattcttatcactgccctttgaaagcctgattcattttcaataggcttttccttagtaggaaaacagtatgtctgtttttattttcaaactgaaaaatttatttttcaaatgggagcttaaaaatgtatttttcaaatggaagcttattttcctttgaaaatccaaaaggtttattatgcattcctttgaaccctcagaaatatcgttaagtttaccacctatatccgaaagcccttttgataaggcaaagctaccagttggccttcttttggtttttgtagagactattgctgcctcatttaatagcccctagtagctacaattgaaacctcagcatgtatctctgatttagaaatcgtagagctatgtagggaggcaattttttttttagcgcatctttcttcattgaaaaaagcaatacagaaacaataaaaaagttttctctctttcctatctatgcagacctatccagatgaggtctttcctggagtaatgtagtgcagagattaagggtatgagtcctggacccaaaaagacctggcctccagttctgcctgccctgttcactaaccctgtgaccttgaacaggttacctaatctgcttcaatttactgacctgtaaaatggggatagcaaaagtacttacctcctagcattgttaggattaaacgagacaatatatggaaagaaatcagcaaataaaaggactcagtattttgtagttattattatgatgtctcatcctttcatctccaccctagaacctagaattcacttctatccatcatggattttatatatttaaaccaaatcaacccagtaaattccaaaaggaagtcttgtaaaatgctcttcctaacactcacaatgattttaacattctttgccactactctttgtataatatttaagaataaatgtccaactgcaaagaaaaaaaaattatgttaatactactagaggaagtgaaaaaaagcaactgaagcaagttacatctgtagtcattgttttcatcttgcaggaagcagaacagactaaaagcaacaacgtgcagctagagatgtgggtttgacaatcggaaatactgaatttattcatgtaatctctctttccccacttatcagctattcacagctaaaaatgagggccgagagggaatcttaagtttttcctggctacttctatacccagaagtacagtaaacctgagcttatgaacacatttccaccccctactcctcccagtgaagtctctgaaagcatgataagaagtgacgtgattatatatgcatgcctcttttttttctcccttcagtaattctttatctctctccatttattttcactgctctgcttcaaagtcattccttctggtcctgtcattttggtcccagagaatatttcctagagaaagcacacatgtgtattcctcctaaaatttgttagagaaatcctgttgtgggaggggtggggaaggagaccaggatccggaaaggatgattgagtgaattttacccctgatttttcaacatagcccccatcttaaatattctcgaatagcctatgggttattgctcccacagatcttctcaatttattagggaaaaagctctctttttttttttcaaaatattaccatacttagaggcatacaaaatcctttattgcccaagtactgatctggctctaagtcttattaactaatgaaagctgcatcttcttttcctaagggttaaggataaaatgagaccatgatagcaccaccttatatacaacccacgtttactttctaacttggtgacttttctgactgtttcagattccacatttgatggggtgactgacaaacccatcttagactgctgtgctgcggaactgccaagtacagactcacattttatgggaattggtccgagaagacacacccaaaggattaccctcgtgagtagagtggctactctgtggtttggggaaaagcacattgtcaaagttctgtctggttatagggcacactagctgcagcatgtcagatctgctccctagtattggctggttcatgaaatgcacaatccaagtatgtatattaatcaagacaggcagacattatatgggtatgctttcagcttctttgcatagcattgtgctattttttttctttttttttttgagatggagtctcgctctgttgccgaggctggagtgcagtggcacaatctcggctcactgcaacctccgcctcccgggttcaagcagttctcctgcctcagcctcctgagtagctgggattacaggtatgggccaccatgcccagctaatttttgtatttttagtagagatggggttttgccatgttgcctgggctggtcttgaacacctgacctcaggtgctccacccaccttggcctcccgaagtgctgggattacaggtgtgagccactgtgcccagccccagcattgtgctttcttatctgtgatttttaaaaatattcccaaagtcatgctgcttatattcaggtgaggcatttggtaacctcaatccccctgcaatgaccctgtccatgaattccatgacagacctgctggaaatagcggcaaaagggacctgctcttgactctataggtcaaggtcaacaaatactctgctatcataggtgttagtaattagtcagcatgccttttttttactgacttcagatgccaccttgaaatcccttcatgaggggccaagcatggtggctcaagcctgtactcccagtgctttgggaggctgatgtgggaggatcctttgaggccaggagttagagacctgcctaggcaacatagcaaaattctaaaattagctgggcatggtggcacatgcctgtagtcctgtagtcttgcctgtagtcctagctactcaagaggctaaggcaggaggatcttaagcccaggagttcaaggctgcagtgagccatgaccacaccactacactccagcctgggcagcagagcaagactctgactcaaaaaaaaaaaaaatcttttcataacattgttatcaagatagccaatacaaagccatgagagttgtcaggagaccccaaacttactattttttaagtagatcctactaattccactttatcatataattgtctcaacaaacgcctaacatgtgccaggcactgtgctcagctctagagttataatactgaacaaaaaaaagatgcatcccatattctcaagccactcagcggctagtggagagacagacactaaccaaatagtcatgcagaaagaggtgaagactataagaaaagtggacttactgtgaaccaagcatttctacatatgttatagtgtttaatcctcaaagtaatgtgtttttgtggataagtttactggggaggagagagatgtcatgatttgcccacattgagatgtaagtaatggatccaagatccaaaggggtttttcagtctcctatgcctgccttttgtttgggttgcgtgttgcccattctctctgtgggtggcaggatgtccatgtgtggcactgagcctgtttttttctgttcattgtctgttttgttcttgtgcattttactttggagttaccgcagttcaggaagaacagtaggaatgggagagagagattaaaaagagggatttggctcaggtcccaaaggaaagggggagaaaagggcacatgattggacttaagaagactcagaccagatcagaacctccatgatccccacgcagcccacccagaggggacttcgacatttgttgacaaatcaagagctctattgtttaatgttacccacatgcaatcaaggcttgggatcttagaagcctctttctagttcattcttctgactctgagattcagcctgatctgcatcagctgtgtgggagacctgtgcgaagaaacttggactctctgcctgggggaaagaaaacatttggaacaagcacgatggaaaaatttcctccagcctctcctatccactaaccagaggaaataaaatgttaggggcccgttactcatcttttgtgatcctaagaagcttcttgacctttcctattctgccactgtcatttcccagaatttagggaggaggtgaaaaaaaaaaattgtttctgggtctttgggccaaatcaagtacaaatctatacagagtttctgtggagttgttgagagtttcttagtaaatatagcagacgtgtgttccagatcttctaggattgttccatttttgacatgatgtcttatagacaattgtcagattgtgtcctaatttttggttggaaaaatttggtcacttgtacagaatagcacttaacatagcatactgtagttatttttttaaaagtctttctttcccactagaccaagaagtcctccaggacaaacgtgatgacgtgcttatctttgattcttagtgcctgttgtcttcccaagcactgtgtactgattgttgaactccgagtcacactcattatgacctgggaggcagatgtctagccttcagctaattatgatgggcagtatggaggagagtgtgagtcaaaccttccatggaggaaaaggagtgaacactcagggagactggagccgtttaaaaggacatggggaggatctaatcgggatcttgaaaatttaatgttctcaaaagttatttctatcagtcttaagtaatagatgaatttctttttgccactgcaaagatgatactgtcttgataaccattctctatcatcatgcccagagaagcttcccacaatagtgcaaactgacaattgccaagcccccctgtcctttattagtcatccaaaacactgctttctctacagtgatcttaggacagtggttcttaagcttttaaatcttaggaccgcttttgtatgcttaaaaaatctttgaggatcccaacataagtggtttatatgggttatagccatcaatcttccatgtatcaaaaactaaaacagagaaattgaaaaatattatttatttttaaaataaacctagtaaattaaaaataataaacttgttccaggttaatataaagaacatattttatgaaaatacctatattcaaaacaaaagaaatgtgaaaagaggatcaatgttttacgtttttgcaactgtcttttctatctggcttaatagaatacacctggattcccatttgcctttgcttttgcattcaacttagattcaaaatagattcaaataggttcaaaaaatctattttttggttgaagtatgcggagaaaattctgtctcatatggctatgtaattggaaaagggaagagtattttaataaccttttctgataattatggataatctttgatcctacaccagaactctgcaaattgtttttttaaaggttaattacaatgtggaatttgaaactatatcaatgaacttgtactcttacattaaaagtcattgctttaccttctactttgaatggatcttttacaaatgcatggttttgtaacatcttacgttgatcatttggaaaatattggtttactgagttatgcagattgtgcaagtgttgacacagttcattaaacaatatgaaaagccatatccattaatatcactaccaatctcatcagaaaagtatttaatattggaaagctatcaagttcataataatgaacacaagttttctaaaattctgggttttgcttgaaagcttgaattttatcattggcaacaaatactgtcagttgttttccttgaagtgacaggatcactttattttttagaaaatgtaggccaaattcccaagtctgaataaccataatttgtctgtcatttgtcctttcaagtgaaaatgatgttttatgaacataaaaagcggctagtccagcttgcacctcaaagagtcgcataagtgcttttattcaagacaatcacagtacttcagtatatagcagaagtgcttctgcgtagttcccaattagtcacacagaaaaaataaaaatatgtttactcaaaggcagagatctaatgaaattaatcatttttattgttttttcaaggacattctttttttttttaactttaagttctgggatatgtgtgcagaatgtgcaggtttgttacgtaggtatacatgtgccatggtggttttgccgcacctatcaacccattatctaggttttacgtcccacatgcattaggttatttgtcctaatgctctccctccccttgccctgcactccccgacaggaccaggtgtgtgatgttcccctccctgtgtccatgtgttctcattgttcaactcccacttacgagtgagaacatgctgtgtttggttttctgttcctgtgttagtttgttgaggatgatggtttccagcttcatccatgtccctgcaaaggacatgaactcattcttttttatggctgcatagtattccatggtgtatatgtgatgcattttctttatccagtctatcactgatgggcatttgggttggttccaagtctttgctgttgtaaacagtgctgcaataagcataaatatgcatgtgtctttatagtagcatgatttataatcctttgggtatatacccagtaataggatcactaggtcgaatggcatttctggttctagatccttgaggaattgccacactgtgttccacaatggttgaactaatttacactcccaccaacagtgtgaaagcattcctatttctccacatcctctccagcacctgttgtttcttgactttttaatgatcactattctaactggcatgagatggtatctcattgtggttttgatttgcatttccctaatgaccagtgatgatgagctttttttcatatgtttgttggccacataaatgtcttcttttgagaaatgtctgttcatatccttcacccactttttgatggggttgtttttttcttgtaaatttgtttgagttctttgtaattctggaaattagccctttgtcagatggatagattgcaaaaattttctcccactctgtaggttgcctgttcgctgtgatgctagtttcttttgctgtgatgaagctctttagtttagtaagatcccatttgtcaattttggcttttgttgcaattgcttttggtgttgtagtcatgaagtctttgcccatgcttatgtcctgaatgatattgcctagattttcttctagggtttttatgcttttaggttttacatttaagtctttaataatccatcttgagttaacttttgtataagatataaggaagggtccagtttctgttttatgcatatggctaggcagttttcccagcaccattgattaaatagagaatcctttccccactgctttttttttgtcagatttgtcaaagattagagggttgtagatgtgtggtgttatttctgaggcctctgttctgttccattgatctatatatctgttttggtaccagtaccatgctgctttggttactgtaggcttgtagtataatttgaagtcaggtagcatgatgcctccagctttgttctttttgcttaggattgtcttggctatacaggctcttttttagttccatacgaaatttaaagtagttttttctagttctgtgaagaaactcaatggtagcttgatgggaataacattgaatctataaattactttgggcagtatggccattttcacaatattaattcttcctatccatgagcatggaatttttttccatttgtttgtgttctctcttatttccttgagcagtggtttgtagttctccttgaagaggtcattcatgtcccttgtaagttgtattcctaggtattttattctctttgtagcaattgtgaacgggagttcactcatgatttggctctctgcttgcctattattggtgtataggaatgtttgtgatttttgcacattgattttgtatcctgagactttgctgaagttgcttatcagcttgagattttaagctgagatgatggggttttctaaatatacaatcatgtcatctgcaaacagagacaatttgacctcctttcttcctatttgagtatgctttatttctttctcttgcctgattgccctggtcagaacttccaatagtatgttaaatgggagtggtgagagggggcatccttgtcttgtgctggttttcaagggaaatgcttccagcttttgcccattcaatatgatattggttatgggtctgtcataaatagctcttattattttgagatatgttctatcaatacataatttactgagagtttttagcatgaagcagtgttgaattttactgaaggctttttctgcatctattgagataatcatgtggtttttgtcattggttctgtttatgggatggattacatttattgatttgcatatgttgaaccagccttgcatcccaggtatgaagccgacttgatcatggtggataagctttttgatgtgctgctggatttggtttgccggtattttattgaggattttcacatcaatgttcatcagggatattgacctaaaattttctttttttgttgtgtctctgtcaggttttggaattgggatgatgctggcctcagaaaatgagttggggaggagttcgtctttttctgttgtttggaatagtttcagaaggaatggtaccaactcctctttgtacctctggcagaattcagctgtgaatccgtctggtcctgggctttttttggttggtaggctattaattaatgcctcaatttcagaacttgttattggtctattcagggattcaacttcttcctgatttagtcttgggagggtgtatgtgtccaggaatttatccatttcttctagattttctagtttatttgtgtagaggtgtttatagtattctctgatgggagtctgtagttttgtgggatcagtagtgatatcctttatcattttttattgtgtctatttgattcttctctcttttcttctttattagtctggctagcagtctatctattttgttaattttttcaaagaaccagctcctggattcactgattttttttaagggtttccatgtctctatctccttcagttctgctctgatgttagttatttcttgtcttctgctagcttttgaatttgtttactcttgcttctctagttcttttaattgtgatgttagggtatcgattttagatctttcctgctttctgatgtgggattttgtgcttataaatttccctcttaacactgctttagctgtgtcccagagattctggtacattgtctctttattcccattggtttcaaagaactcatttatttctgccttaattttgttatttaccccatagtcatccaggagcaggttgttcaatttccatgtagttgtgtggttttgagtgagtttcttaatcctgagttctagtttgattgcactgtggtctgcgagactgtttgttatgatttctgttcttttgcattttctgaggagtgttttacttccaattatgtggtcaattttagaataagtgctaagtggtgcagagaaggatgtatattctgttgatttggggtagatagttctgtagttctattaggtccacttggtccagagctgaattaaagtcccgaatatccttgttaattttctgtcccattgatctaaaattgacagtggggtgttaaaatttcccactattattctgtaggagtctaagtctctttgtaggtctctaagaactttctttataaatctgggtgctcctgtattgggggcacatatatttaggatagttagctcttcttgttgcattgatccctttaccattctgtagtgcccttctttgtcttttttgatctttgttggtttaaagtctgttttatcagagactaggactgctttttttggctttccatttgcttggtaaatattcctccatcccttttttttgagcctatgtgtgcctttgcatgtgagatgggtctcctgaatacagcacactgatgagtcttgactctttacccaattttccagtgtatgtcttttaattggagcatttagcccatttacatttaaggttaatattgttatgtgtgagtttgatcctgtcattatgatgctagctggttattttgcacatttgttgatgcagtttcttcatagtgtcattgatctttatattttgtgtgtttttgtggtggctggtgccagtttttcctttccatgtttagtgcttccttcaggagctcttgtaaggcatgcctgttggtgacaaaatccctcagcatttgcttgtctataaaggattttatttctccttcacttatgaagcttaatttggctagatatgaaattctgggttgaaaattcgtttctttaagaatgttgaatattggccccccactctcttctggcttgtagggtttctgcagagagatctgctgttagtcttatgggcttccctttgtgggtaacctgacctttctctctggctgcccttaacattttttccttcatttcaaccttggtgaatctgacaattatgtgttttggggttgttcttctcggggagtatcattgtggtgttctctgtatttcctgaatttgaatgttggcctgtcttgctagattggggaagttctcttggataatatcctgaagtgtgttttctaacttggttccattcttgtcctcactttcaggtaccccaatcaattgtaggtttggtcttttcatatactcccatatttcttagaggctgtgttcgttccttttcattcttttttctctaatctagtcctcgtgccttattttggtaagttgatcttcaatatctgatatcccttcttctgcttggtttagctattgatacttgtgaatgcctcaggaagttctcatgctgtgtttttcagctccatcaggtcatttatgttcttctctaaactggttattctagttagcagttcctgtcaccttttatcaaggttctgatcttccttgcactgggttagaacacgttcctttacctcagaggagtttgttattactcaccttctgaagcctacttctgtcaatttgtcaaactcattctccatccagttttgtgcacttgctggagaggagttgtgatcctttgtaggagaagaggcattctggtttttggaattttcagcatttttgcattggatttatcctcatcttcatggatttatctacctttgatcttgaggctgatgacctttggatggggttttttgtgtgggggtcctttttgttgatgttgatgttattgcttcctgtttgttagttttccttctaacagtcaggctcctcttctgcaggtatgctgcagtttgctggaggtctactccagaccctgttctcgtgggtatcaccagcagaggctccagaatcgcaaaaattgctgtttgctccttcttctggaagcttcatcccagaggggcaccagccttatgccagctggagctctcctgtatgaggtgtctgtcaacccctgctgggaggtctctccccgtcaggaagcacggaggtcagggactcacttgaggaggcagcctgtcccttagcagagctcgagctctgtgctggtagaatcctccttgtcaggatctgctgcactcttcagagctggcaggcaggaatgtttaaatccgctgaagctgggcccacagccaccccttccctgaggtgatctgtctcagggagaggggagttttatctctaagcccctgactgggcctgccgcctttctttcagagacgccctgccctgtgaggaggaatctagaaaggcagtctggccacagctgttttgccacgctgtgttgagttccgcccagtctgaacttcccagcctccttagcactgtcggggaaaactgcttactcaagcctcagaaatggtggatgccccttcccacaccaagctcgatcatcccaggtcaacttcagactgctgtgctggcagtaagaatttcaagccagtggttcttagactgctgggctccacgggaatgggaccggctgagcaagaccacttggttccctggtttcagccccctttccaggggagtgaatgaacagttctgtcttgctggagttccaggcaccactagggtatgaaaaaaaaaaaaaaaaaaaaaactgcagccagcttggcgtctgcccaaacagccgcccagttttgtgattgaaagccagggccctggacgtgtaggcacacaagggaatctcttggtctgcggattgcaaaaactatgggaaaagcgtagtatctgggctggatagcacagtcctgtgtctggaattggtgggttcttggtctcactgacttcaagaatgaagccgcggaccctcgtagtgagtgttacagctcttaaggtggtgtgtctggagtctgtctcttctgatgttcagatgtgtttggagtttcttccttctggtgggttcgtggtctcattggctcaggagtgaagctgcagacctttgtggtgagtgttacagctcttaaggcggcgggtctggagttgttcgttcctcctggtgggctcgtggtctggctgggctcaggagtgaagctgcagatcttcacggtgagtgttacagctcataaaagcagcgtggacccaaagagtgagcagcagcaagatttattgcaaagagcaaaagaacaaagcttccacagtgtggaaggggacccggttgccactgctggctcccgcagcctgcttttattctcttatctggccccccccccccccccccccgcccacatcctgctgattggtagagcccagtagcctgttttgtcagggcgctgattggtgcatttacaacccctgagctagatacaaaggttctccacgtccccatcagattagttagatacagagttttgacacacaggttctccaaggccccaccagagcagctagacacagcgtgtcgattggtgcactcacaaaccttgagctaaacacagggtgctgattggtgtatttacaatccctgagctagacataaaggttctccaaagccccaccagagcagctagatacagagtgtcgattggtgcactcacaaaccttgagcgagacacagggtgctgattggtgtgtttacaatccctgagttagatataaagactctccacgtccccaccagactcaggagcccagctgacttcacctagtggatcccgcaccggggctgcaggtggagctgcctgccagtcccgtgccgagcgctggcattcctcagcccttgggtggtcgatgggactgggcgccgtggagcagggggtggtgctcgttggggaggctcgggccgcacaggagcccatggagtgggtgggaggctcaggcatggcgggctgcaggtcccgagccctgccccgcgggaaggcagctcaggctcggtgagaaattgagcgcagcaccggtgggccggcactgctgggggacccagtacaccctccgcagccactggcccgggtgctaagtccctcattgcccggggccagcagggctggccgcctgctccgagtgcggagcccgccaagcccacgcccacccagaactccagctggctcgcaagtgccgcccgcagccccggttctcgctcgcacctttccctccacacctccctgcaagctgagggagtgggctctagccttggccagcccagaaaggggctcccacagtgcagtggggggctgaagggctcctcaaatgccgccaaagtaggagcccaggcaggggaggtgccgagagcaagcgagggctctgaggactgccagcacgctgtcacctctcaatccctcacggcttccttttgctgggggtggcggggcgggggaggcccccagctgcttgcacttcctgggcaaggcgacaccccaccttgtttctgctcatcctctgtgggctgtacccactgcctaaccagtcccagtgagatgaacagggttcctcagttggaaatgcagaaatcacccgccttctgcattggtcttgctgtgagctgcagaccagagctgttcctattcggccatcttgccaataccctccaaggacattcttaagtgaaacggaccccttttgctttttactgttggtatgtggcagtgaaaaatatatcagcgactaacatggtttggggtcattaacttgatccatgctcagtgccagagttaatgtcaatacattacaaagggaagtaatgtcttagcattattataaaaatagttttcaccttctagaccccctgaaagggtcttggggttccaaggggtctgtggtccagactttgagaacctctgcaataggtaagatagcaacctaaggtgtctgactttcagtactctttgactaacttgcccttgggaatttacgttggacactataggaaggatggggcaatacccagtctctgcaggtgggccacatctgccgaggctcttctcaaccattttacaaaatggtttgttccaagtgctgtttctggggttccttccattggagcacagtgttctctctaggaggggctagatgtggttagataagaagggaggcaggggaatcgcctaaatgacctctggcattccctatctattgtaatgctatagatctctgcttgtcatctggaaatagtgaaatccttttaaaacacttctaatctagtagttctagaaacgcattttaacttatcatgtaagttttacttcctaattttacaagtgaaaaactgaagcacaaagaagttacagactcagatgacatagccacagagtgtccgaaacaaaatcaaagcttaggtctcctgactcctttttgccttcctctgtaggctattaggaggccatcaatcttctgtccttctgcagaaaaattagtatcttatacacaaagcatcttttaataaggccctgctgtactaacatgaactcaactggtaccaaatttggtgccatactgaacagctttgccccactctacaaaaacctgcattgcagagatcctaacttagaagtcagaaagagaaggtctggattcactggtcctgagtggagttcatggaccttaaagtgtcagaagaactgccagctcctgcaatgtctgttcgaggcactgtgagtctgtagcttccagctatggctcagaagcagttgcttcacagaaacaaggtgactaggcagtgtaaccacatgagggtgtcctggaggctggagacatgcccattctttgccaaggaattgggagttacctaaaagatgctgagtctctttattctctagctctgaatacagctcttgggtttttgacaaatgctcctatcccatagagaccctttaatcacctttgacaatgtaagctgcatagcttcccccatttttgatatgacatcggttttaatgctgtttaacagatatgcattgatgaaaagaacatttttttccaggagccaatcacgttttccgtttgacaatacattgcctaaaatataaatacagcaattgggaaatatactctatataatcaaagttcattttacaatgaaattcagccatcttttctattggatcaccagatttaggaaattattattaagtccaatcacatgaaaaaccaccgctctaacacttaacaactacttttgtttcttcatatattcatctatgtacagagtatgtatatcacatttgaacatactgttctactttttgcatttgattttgtcttcatactcatatcagcttattctaagcaacttatctattgttttattgatcatttaagtaatgtcaggtcttttgctaacatagaaagcactgcaataaaatactttgtacttaggccaggcatggtggtcacgcctatgatcccagcactttgggaggccaaggcagatggatcacttgaggtcaggagtttgagaccagcctagccaacatggtgaaaccctgtctctactaaaaatacaaaaactcaccaggcatgctggtgtgtgcctgtaattccaactactcaggaggctgaggcacgagaatcgcttgaacctgggaggcagaggttgcagtgagccgagattgtaccactgcactccagcctgagtgacagagtgagactctgtctcaaaaaaaaaaaaaaagccacacaacgcttggtacttaaagtcttcctcaacccgtctcctttctttggaattatttccttgaaataatttcccaagatgaaaactgctggatcaaaggatatggatttttcttttggcccttgatacatcttgccagattcttctccaacacatttgtatcaattcagtttattaccaataatgaataaatgtgtctgtttctcccagccttctcagcattcaattaaaattttaattaaaattttatttagtaataatttattaaaattaatcttattttaaattggcattggtttaattaccaacacacttgaatcttttttcatgtttattgtcctttgcctttaaaaccactagggtgttggcatgaatcaagtctgattttgctccttgtctccccagggcatcagtcattgtctggcacactgaaagttctgaataaatagtgtggaatgaatggatgaatgaatgagaagcagttacaaaatgaggaaggaagagagtggagggagatgagcaatgaaaagctgctgatgaagaggttagggcaggagagagataaggccatatgtggctgctgagtggacagcagcttggatggggccagtggtgtgtgggaggatgcgcaaggaggacattgcagtcagttagtgggcaatggtgtggcttggactgcagcggtgaaagtggtaatggagaaaattggtatatttcacatctcttttaacagtagattctgtcatgaactggatgcggaggagtaagagagagaaacatcatagctgacaagctaggtttctggcttggaaatggaggtgctctttcttttgaaaatattcctcaatattattatctctctctttttacaaatgactttgaaatcatttcatcaggctctgaaaaggatcctgtcagaattttaagtgggattgcactaagtctcaaaattaccttgagaggaattgttagctttataatgtttagcttgtctagttttttcccatttatgaataaaaccaagcatttctgggtttccttagcaccatgcctagaagagtgataccatatggaccatagcccttctttctcaatctaactgcagaaacaaaattaaacattatattacagttctccagagaaacagaccaacaggagatagataaatgagagactagatagatagatagatagatagatagatagatagatagatagataatacatttttttttgaggaattggctcacatgattatggaggctgagaagttccacaatctgccatctgcaaaccggagacccaggagacccagtggtgtagttctagttgaattccaaaagcctgagaacaaagggagccaatggtgtaaatcccagccccagggcaggagaaggccaatgtccctggtcaagcaggcaggcagggtgtaaagaaatggatttcttcttcctctgcatattgttctattcggccctcaattgattggatgaggcccacccacacgggggatggaagtctcctttgttaagttacctgattcaaatgtgtatcacatctggaaatcctcacagatgcacccagaaataatttgggcacccaatggcgcagctgacacataaaatgaaccatcacaaacatacaatgaacaataatcccactgcttccttcttccatcactgtggaatccctcccaatcctgagaagtctgcccatcagagcatctcagctgtgccactgccagtgctatgatgggacaggagacattgctgctgccaccaggctgagtcacaaatataggatttcaccaggaaatggaatttggcacccaacacttgtgtcgtcatacacagtttcagtgaaagaaagggcaaaagagaaaggattaaatatcttctttaccctttttctcttgccttccttctgcctctctggaaaggaagtcctatgacaaccagtcactcatgtatgggttgggagtggagaaggaaagtccatgatcacattttccagttaaacagggaaggctgaacacataaatctctgttgtttccccaaatcccacaaagataacactagatgaataaagcagactcagtcccagaggatttctctcacttttttccagcacttttaggtactttgcacaggtgtgttttttagggatttcattctcacccccagatccactcttctctccatcctgctttgggagggtgacgtcgagggatctcatcaagtggctctctcgccctctgcattccagctggatttggtcagtgggaagccaaggacagaggaaagtgaggtcagggtctctacctacccacccactgctccctgccagtggaggctgcaggtgggtggtcctcttccagcagccacagcttctgcccagccaccctgtcttccagcttcaactctccctcctggttcctgaaactgctcctcctcaggtttaggggtagtcacaactccctgggagcttcacctttccttattgcactcctttgactctgccaggcccttataaaatgtcccttcatcaaactcacttctcttgccccacttgagtatgccatctgtttcctgtgggactgagactggtattgccactttttcagaaattgattcttagactctgtacatgtattattttgataaaataagaagcaaagctaacaaaacagtaaagtcagttattactatagaattttatgttgctataggattttataaaagattatacatccccactgtactgaggctgccctttctgaattgccttcctctcccccatcccactcaaatgctgcttccttccattgctcacctaggacctaaaaacacccaaatgagaatgtcttttctctgggtctgtggctaaactcagacgccaatccagttcccattcccaaatcttctctctttgccaacactaggctgtcatctaacccaaaacatactcaaaggaacaacgttataaagtagattattagataggggtttctggaattttagctaagaggacaccctttaataatagggagtgcattttcacagatcatgtttcctggtttaaaaatatatgcaatttccgtaaaaactgagacttgaagagattttaattttttctaaatgatttttgttttctcaagaaggctttgctgtttcattcttatatatgcttcatcaagttaattcctagaattattttatgttttggttattatgaatgagatttccagttttcattacgttttctatcaggttataattagtgtacaaaaatgctctcgttattcccatttattgtacctctatgttttttcctaatagttttacctaatattccttgggttacataagtaatcaatagctatttgcctagctgggcatggtggtgcgtgcctgtagtcccagctacttgggaggctgaggcaggaggatgacttgaacccatccttgaacccatggttaaggccattgagccatgattgtaccactgccactgcactccagcccaggcaacagagtgagacctcatttctaaaaagataaataaacaaaataaaaaattaataatttgcctgtaaaacacaacatgtttttgtcttttttttttctgattactcttccatgatttctgtggtctcccacttgttcactgacaaggtatgatgttgactcttggcttccaggatgttaaaggatgtttaaggatgttaaatatagatgtacacttctaatttttttaatgggtgttgcatttttctttctttttgagacggagtctcgctctgtcgcccaggctggagtgcagtggcacgatctcagctcactgcaagctccgcctcccgggttcacaccattctcctgcctcagcctccccactagctgggactacaggcgcctgccaccacgcccagctaattttttgtattttttagtagagacggggtttcaccgtgttagccaggatggtctcgatctcctaaccttgtgatccgcctgcctcggcctcccaaagtgctgggattacaggcgtgagccggatgttggattttctaatgccatttcagcgcttattgatatgaacaaataattgttactattcaatctcttttgtggagtattataattactagttttcaatttgctagactattcatccattctgtgatgagcctaatttaattgtggtttgttttttccttcctttagtacacatgtgtaattataaactattcacaaagcattatatttttggtatacattttctcaataattcttgccttagcctcataggatgaatattatgctcctgatttatggaagagaaaattgagtctcagagaggctagagagtaggcccagttcatagagcaaatctgtggtcgagctggtgcgtgatatgaaaggcagagagagagagaggggtgggaagagagagagagagagaataggaggggaagagagacagagggagaagaggagagagagggaaagagaggcagccagagaatgatgcactggctgtgccacaggtttgcactatgaaatgcatctggctttgaatctgggtccatctgaccctagagtcctttctaccatgcctctcctttaaagtggtaatccattagtattgtcattaaattcttcagatctacatgcaagagtgaaagtggtacacaattcctgatttttaaatcaactctttatctgactgtagtctcaaggccatactagctttgaggagtaaattggttagttcctacctacctgtttttattcataattgagactttaaaagaattatccacacacattgaatactttcccttatcctcacccccaagttatccaatttcttcatcagttattggtgtattcaagctctttcttttatgtcagttttagaattttactttttcctttaaaaattatccattttatttagattttcatagttcctagcatacaactatagagtgcagtaagatcattcactatttcctggctaaatttacccgtgttagctttatctaataagctgtgtagcttattaaataatgctactgttatgctgttggtaatttacacacatccacttttatatatactgttcccttctatttcttttgggttgtccttttgttcctttggtgaatttttatattgttgacttagtatgctgattttcccattttgttttttgtttttattaataataaatgcacttaaggctgtgaattttcttagtgtagctctgagcccttcccagggaatttaatatgtagttctcattttcattgttttcttaatagagtgcttttgtgcactttatcttcttgacatatttgttaattagcagattatttcaaaatttctaagtagtcagagagttttgatttacatctttgttcctaattttgttttattttgttttggtaagtgtgttagtccatttttgcatcactataaagaaatacctgagactgggataatttataaagaaaagaggtttaattggctgcaggctgtacaagcacaactccagcatctgtttctggtgagggcctcaggaggctacaatcagggctgaaggccaagcggaagcaactgatgtcatacggtgagagaaggagtgagggacagagggaagaggtgccacactcttccaaacaaccagatctcctgtgaactaccagagcgagaactcactcatcaccaagcggagggagctaagccactcatgagggatctccccacctgatccgatcacctcccaccaggccccatctccaatactgggggttacatttcaatatgagatttggaggggacaaacatccaaaccatatcagtaaaagagtgtgttatatataatttctgcttttttgtacttactgagtttttttttttttttaataacctagcttatgttgactttcaaaagcctgttttcttattctgcctcaggtgccaagctatgtgttacctagtgacacacaagtataattagtccatgaaaggcccctctgggccttgttgtttgttcgtttgattccatctaccccatatttattgtgattactgtcctactataatttttctgccatgttattatacatttctgattgtactttctcatttctttttttttagacaccttcttttctttccattgcctaaattattttcttctgctggattaaaagtgatttgatccatttttttgttgttgttcttatggtggttgcctttaatgtaagacacgtacttatgtttatctctgttgaattcataaacaaaacaagtactttagcatactttataattcctttggtctctactatccctgtacccaaatacacactttatgttggttattttctagaattttatttctggattgtatggataatttcttttttgtttttctctagtctttgcttttttacacaaccataaacattactaaagtgttgttcacccatagctctttagcatttttcttatttcactattttctacaagagtatttttataatacatttttgcaaggcaaaccccctaaggccttatatgcctgagaattttttattatgctctcacatttaaatgactgatggctgacataagacctgcattcagaaacactttgttttccattgtccagtgtgtccttctatccagctgcttagaagcctaatctcagtctgaatttggttgcttcctaggtgatcaaatctctctctctgttttgcttttccatttttttgttgttgttttgtttggtttgttttttgctgtctctttgatgttctttattttcacagttaatgtgacttgatgtcgtttttttctttttaaaacctggttttcggctgggcgcagtggctaatgcctgtaatcccagtgctttgggaggctgaggtgggcggatcacccaaggtcaggagtttgagaccagccagaccaacatggtgaaaccccatctctactaaaaatacaaaacttagccgggagtggtggtgcatgcctgtaatcccagctactcaggaggctgaggcaggagaattgcttgaacccacgaggcagaggttgcagtgagcagagatcatgccattgcactccagcctgggtgacagagtaagactccatctcaaaaaataataataatttaaaaataataataaaataataaaacctagttttctattctatgggtcctttaaatatgagggctttcctcctttaattctggagatttattttttgtcaaatatttcccctcctccttttttctctttctgagcctctggtgactcagatattgtcacttctactcatttccttcatatcatctgggttttattttatgtgttttttcccttcctacctcactgctgcctttaaaaaggcttagatcatctaaaaatactaaaaaacaaactcaaaaacactaaaaaggtctattaattaaagagaagaaaaagcaagtgagaagttcctcagttttatccctaggccactcattctttagtgccaaccatcctgcttttaccccaactactatgttgcttatttcaactgttgtgggggttttattataaacctttatgttgaaatagcttcaaatttatataaaagttgcaagaatagcacacagaacttctgatcacctgtcaccagattccacagttgttaacattttaccacatttcctttatcattctctcaccatatagatacatattattttttgtgaacttctgagaagtagcagacatcatgcctgtccttttacctctaaatacttcagtgtgtatttcctgaatgtttttgtaatattttgtaagagaacaaggatgctcttacaaaattacaatacacttatcattaacattgataaaatactataatctaatctatatgtcttgttcaaattatactcattatacctctcatgttctccaaagcaatactgtatcatatcactataatgtaaaccacaaatatgagccacgtatgtaatttcaagtgttctaatagccatattaaaaaaattaaacagaagcaagtgcaattaattttaatgttctattctattttatttaagccagtatatccaaagtagtagcattttaacatgcaattcatataaaaatttattattgagacattttgcattctctttttcataatatgatccattgtatttttttacacttaacagcacgtctcaattcagactagccacatttcaatcacacagtagctacatgtagctggtggcaaccatatcacacagcacagttttgtagcaaatcaaaaataaaaattctggttcaagatccagtctaagattatatactgcatttacttgtcaggtctctttagtcttgttcaatctggaatggttcttagtccttcttgactttcatgacactgatgcctttgaagagtacaaggcagttactatgtagactctccttctgtctggggctgtctgatgctttctcataattagattcaggttgtgcatctttggcagggataccacagccattatggatatttgtttaacacctaatttacattttgttctttttctctatttcttgttcttgcttcatattgctaacatgctcccgatctttgagaatatgtattgtgcttctgttaaatttttggtccatctgttgcaataagctgcttcatgttcagcttgcattctctttcgctagttgtactgcttgggatttagttactgtggcaggtggtcttctgtttctgtggtgatataaatgttctgcctggtagtgtatgatggggaaaggccaaatcctaggtggtgccccttctggtgtgtataaggaaaaggaaggagacgaggcccaggcatcatgtcgctgctatcaactcttctgtttgctttcttctactgggtaacttattcagttaaggattcatcctgacactcttagaacaaagcaggaataggaggaagtgatctcctcaggttctaatccccagccctgcaagtctggaaacagaagggatgaagaagtgtatacccagtgaaggctgggattcgtttatccctgtctctcctgagagggctttatgctgctgccctgagattattctggctgggaataggaatagagctggcctagtcctgcagacatctgggttgcaggacaggcaaggacccagaccctcccttggtgatgtcaaggaggggaaatgagagaactgcaatagtcctcacaaatccatcctcccaccactgggccagaggaaagaggaggattcatcactccatctatcctctttttcctgggtcaggatagcctttgatctcctctttatttcagtgtctctgttagttccttggatctgtgcttccctctgcttctgaagtttccctgggttgaatttagaggatgaggagcacatgctaattcaccgtcttatcaggaaacagcaataacatttcagggttttttatttgtttgcttgtttgttgttcaatctattaaattgttggcaatacctaccctttctgctgtatgtttaattatgcttttcagtctattaatttatcattttcttattaatttatcatattctgataatggggtattaataccttgttctaaaattgtatacttattaatttccctttgatttttataagggatttgttgctatgttctttgaaccttatagacataatatcattatgctctcattattaaggcttttatcacataattaacagttagcttgctttaataacttttaccataattctaccttgtctgaaatctcacttgctttttttccctttaattagtagacctttttagtgatttttaaatttactttttagtgtttttatcctttttctaagcctttttaaagatttcccagtaaattattgcattattccagttggaagcatttttttcgtttttgtgttttattttttcttcctcaaaattgtttgagcttatacttattttaaccctagtccgcttaggtttatgttcttccattttactttttatctctcaatttttatagttaatttgtttttttttcccctagatgttctttggtattatatacacaattaatttgtttggtttgggttttgcttattttaatttcctttagcaactgtcttctttttaatttgattagctgtcaatttaagataaaccacaaagatttcattatcaaaatggtatctttgattctcttttatgggaaacttttgttctttttttgttcttccctactctgttactgcttccatttttcattgaattaacttgttgctcagtttatttattttaatctgcttttattctaacaattttcctaatgcccaactcctatcacaaacaattctttctattgtttttgtttacttatctcttcaataggtacatactaattcaagatttcatactatttttaatagcatcatcttttttcaggtctatcttttaagatcagatttctttttgtagtaacttttgaagtcagtgctggtccattagtgggtgaccaaatttcttaagactgaaaattcatgaacatctttacatttggataaaaacttgactgtataaagacagaaattatacagcttctttactctatggtatgtacatggttttttcattacaatgaagtccttgtctacttatgactatatcttttacatgaaatatgtaacctagctccttgcagaatgttttcttttccttttgtaattaaaataaaatatttgatgatacatgttgatttcagttatttttagtggatcttaaatagggctctgtttgtactttaacctttaactattttattaatggttacatttttcttctagtggatcttttctttttctaatcttcaatgttttattctttgtttgctcattcattccataaatctattcaaagcatctatttcatgcaagcaatgtgttcagttcattccttctctttctttaggaactcctatctcttccagagcactccattctccagatcttcttttgcatatttttatatctcttttcatgctctgcagattttttcctagttcattttctctttctctgttagttacctgtagcatccaattctacattttacctatactaccattgtttactccttcctgccccttcctgctgtaatgagctcttctgaaatagatataatgtctttcttccacatttaagaaatagtttataagtattttctaaatcctgttttgattcttgtttcatttcatggtttattgattcatacttcccatccccaccccaccctgcacccaggttcttaattcatctttcttctctcgtgcctgacaaacattttcaatggttccagtcatttattcccctttactcattcttccttgagtttctcatgatgatatggctgctatttctgaaacctttgcttcagactgttttattcacatttaaataggccttgaaattggaaggttcacaggctctcactcagacttcctcctggaggtccaaaaactttatttcttgagcacatcatgtcctaaataacacacacctgtattggattggccattcagaattagatattacattaaatattactttccttatatctatcaaggtaaagtcccattaccactgagaggggtaagttaatttattgataacttgcttgccatttactcctgctggttggcagtttaaagagcacatgcttcctgcatctcatttatgtagcttaagtagtcacctgttttgaactgatttgagagggaagactggattcattggcaagtcatggatcaattattatgtaagctctaatgctagcagtctcctagcaaaatggatgtgattaacatttaagcacgatgacaacccatgcatttttcatttactatttccttcaaacctatttgccagttcctctgctgtgattccaagaaatgcatactttaataataaagacttaacttttcctttgtatgaaaatattataaacaccaaaaagccttatgaaattataggagggggaatatcaaagaccattaacaacattatgtatggtcacccaggaatttgcacacaaaattctgccaaagctagtgtcatttatgtacttaagttttccaaacaacgagttgaaaaatataccctcaagaattgtttatgccaagaagggccaactatttataatcacaagtggagtttctgcaaaggtctctgccagccactacagtcctggcatacatccctcccaatctgcaaaaactctactgtttggggttgaaagtgaagcatgagtccaaagaaatacttgcagctttttcctagactcagttgaattcagagtgaaagaacatagaagacgacaaagggtataggaaatcgcagcataggcagccctgccttatttttagtgaaaaggattagtactggtagccctgcagtaaagctgatcgcctgtgatcagggagtaggatagttgtaatccctttactataccactgagttgattgattaaattgaaagttatgagtcaaatgcccccagagcatcttggaaccttcctgagtctgtgcatattcatatggtcctaatgaccttccactggaaggaaaaagtgtgtgctgcctgcagggaacacatgaagaaaggcttaggacgaagcaaaactttttcacaaccaccagcaagagtttaattaaactctgtctaacattataagcttgcctcaatttaagagcaaaatgtaccaggtttttcctgcacatggagcctcccagggtcttgcagctcaagtggaaagaacaatgaaaagcagaaggctttcattttacatctggctccttgaaatggggctaagaggctttctggagggttttgctggctgggacagttagtgtttacagatgtgagtggctttcagtcattgaatgtaaattgcatttgctttgttgcacacaccctgggaaaaccaagaggaagaagagaaataatgttcctttatccgcccacacacattgatattcaaggcacagtcttttcaggtttattgggtccctaagcaacctttgaagagatctgtacatctgtccggctgtccgtactccagcggacatggattcctttgctttgcttttcaagtctctggttccatctttggtccgttgactgaattttttggtaaacatttcttgcattcagacctgagtggccacccagctcctgggctaattctgcttctctcttaaaatttgatctgtattctgaaggcaagatcctcaggaaaaaaaaaaaaaaaaaaaaatgaaagagggctagcttttaatgtggaagctaaaagcctaagaagtaaactaaaataggaaggtgggagagagagcaagttcttgctgaaataccaaatccccaaaccagatcagagtaatgcgagagtggaaaggaagcctttctaaagtgagagaaactgtaatctaggtttcttttgcaccttgcagctccccagaaaagagtagccaatggtcagcactccgctgagaggcaatacatattgtatatagtttgaacaataatggactattgtgagtcagatccatctaggagtgttgaatctgagacttactagaggggcttatggaagctacttaacgtgtctgtgcctcagttttctcatctgtaaagcagggataatcaaatcacctatctcatgaagcagttttaaagacgacctaggttcaaagctaatctccaccatttactagctgtagcaccttgcagaagacactgacttacactgacctccagtctcctcagtaaaatcacagtctacatcactgtattgttgtagagttggatgagttaatattcttagaataggcttggaatatgatgaaagctcacaaagtgttcgtcattattattttaaaatgagacgatgtataaatggttcttagctcagaacaagaccaacagcaaggactgtgttagctatggctataatgtgcttatttctagccttgtcctgctacccacccaaattctcaacctctaaataaggatttagctctgatctcatgctgatatcttggataagtcttctcatctgattggcttccatcacctgatgagagtttgctgagattccaacctgactcctgaatttcttccatgtaccaagtggagagagggccaagttccaggtatattttgtcatccctaacttcacaaatatcactggaagtaaagggccccaagtttacacttgacagaccatttataaaagattttatactacaaggcctaaccagcaatgaggaaatagagttttcatttgtgactttttcccctatcagaaaggaatttaataacaaataaaatatatccatttcagcagccaaccagacaaacacatggaactaatcagctaattttaagttagtatttgatgaccttttttttttttgtaaataagaaaagagaagtcagtggagtttggaatttatgtgttctgtgatttctgttggccaaggtcagttttacttgatttctcttcccctctttgcctaccacccaacccccaggagcacataagcaattattaggtgggatctctctctatgtatcctaggggctgagcaacaagcagttagagaggaatcaaagctgggagaaggtaaggaaaccatttaattgttgagctgagtcctgggcagctccttctctttctgcctagtccagtcttacatggtcttcgtatttcagcctaaaccatcacttctttaaggaagctctccctgattccccacactggactggttctagttcttaaacactctttacaactctttgtgcccttccagctatctattgttctgtttatcattctgcacttgaactcctggtctcagtcaatcctcccacctcagtctcctaagaagccgggactacaggttcataccacgataaatagagcaacaagctctatttattgtttagtacagctgcttcaggtttccctagggttatgttcttcaggatattccatataatttaaagcttacagaaataagattaatactgaaaaaggattaagactaaatttttaaaccagctgtaaagtggtacagctgtgcaccaataacataaacacagcttaaaattcattcagtcaccagctttgaaactacggttcttgcaattttttaatttggggaaagagaatttgcattgttttgcacattttgtgcacagagtggctttactaatatttttaaatatttttatatgtctttattaatatttttatgtttctatgccttatgacatgtccatataggtccaaatcagactgctctgtaattatttgtttaattaaattaactggctcccccaataaaggataagttccaggaactgtaactaccctttgttcatttcattccacccagtgcctagcaaaatggtatgtggtagacactcaagaaacctggaagggatttagaagggtagaaactgacaccttctgagaataaaggaggaaaacttttttcttctctgtgggcaggaaggacagcatgttttccatctcaaagacaggaaagagttatctcttcctctgggatccatcagcatcctgcctactcctgcgtcacagcacagatcctaactggcaaaattattaatctctcttccactgaaatagatacatcagacagattcctttctgactgaaactgttctgctgtgaaagactaacaacaaagcagatgctccttcatgcctggccagttctatcagttatcctactggccatccagggtaggaagaagactaaagccttctaacacctgacatctcccaatccaggagagaataagaggaaattcccagttactgagaagtgaattgcagctcccctttttgaggatctaataccatcagccaccccatctccttatgggcccagaaacccatgatctcttattttatctcttcctttataagaattattgagtaattgctatgctgcctatactgtgtcagttgcacatcaattaaacaattgcctaattggactatacattctctaccctactcctggtaccaaaatctgtgttagagttctccagtgggacaaaaccaataagatatatgtatataaaagggagtttattggggagaattagctcacacaattacaagatgaagtcctatgataagctagctgcctgcaagctgggaaaagagagaagctggtagcctggcccagttcaagtctaaaagcctcaaaaccaggaaatctgatagtgcagccctcattctgaggtcaaaggcccaagggctcctggaaggccactggtgcaagttgcagagcccaaaggctgaagaacctgaggtctaatgtccaaaggcaggaggagaggacgagtcttcctctcccagtccactggctcaaatccagtccactggctcaaatgtcagtttcctctggcaacaccctcacagacacatccagaaacaatattttatcagccatctaggcattcttcaatccagtcaagttgacgtctaatattcactgtcacacctgccctaggctattgtttccctgagggcagagactatgttttgttcatgactgcatcactatctcccagcctatgcaaaacaaaatagacaactagaagtatcaaatgaatgacagataacagaatggatagatgaactgggattctggggttcactccatctcttgtagtaatatcaaggaaatgtcataaaagacagaatctaaaccttctttaaaatctatattagttaaatgcattatgcttcctttaatctataagggctgcaaaaatctctcatattaccctcaacccttgggcagcaatcattagtatcttcaagataccacatatattagaaataacacgggacaaactctctatatgatgaacacatccttttccttacctttcattttctgtgtcatctttgctttttccctgcattctatgattttatggcagactctcaagaaaggcattagagttggttgggactgttactatatccccagctccagcaccatatctgatatagagttagtgctgaatacatgttactcaacgaacttgctgcaagaagtcttcacttttaagagaatatttcaattacttaaaacgatcatagaagggaggaatatgtacgtactaacaatctaataaggttactcagaattgtatacacaaaactgctgaagctaacagcatttatatgcttaagttttccaaacaatgagttgaaaatataccctgaagaattgtttatgccaaataaggctgactattcatgatcatgactggaattgctgcatgttttgtgccagccacttcattcctgccaaacatcctcccaatttgcaaggattcttgggtttcgttttgaaaataaagcagtaaaatgcttcttaagctcaacttatgtggggtcttattcttcattagtacttacttaagctatactgattagagtaacatcttaactcttttgaaatgcttattttgattgacaaagtgacatggaatttctaaagtgacaaattgaccaaggagcacagaaacaagtcaatagaattgtgatgttagcttgagttctgaacactcaacacttggaaagaacctcataccaccttttgtgccagagacaccgagaacctgaaaggctgtcagtcagatatttctattagctgaagcaagaaaacttcctcatcctggtggctcctaggccaaaatttgcaggggaaaaaaaaaaaaaggaaaaagaaaaaagctggcagaccaaagccttacattgaccaaggtcttaaacacagcaactagagattatatgcttggaaaataatttataacaaacagcgcaaaagcactcctgataagtgagcctgctgaagacccttcagactcagtccagacctaggttctaaaccagtgagtctccttatttggaagaactgcacaagagtttagcaacccagcattgtaccaattctaacaagaccattacatctaaagctttattaagcatgtagactctgcagtcagaataaatcctgcctccaccacttattacctgcaagaggctaggcaagacatttaactcctctgtgccttggttttctcatatattaaatggggataataataatactaacttcataggactaatgtgaggatgaagttaattaatttatgtaaagcgctcagaagagcgcctagcatatattcagtgttatatacttggcagctattattatgaccctttttcatgatctatttcttgccttggaccccagttctcataactgggtcttaattttcatgcatgtgtcaattccatagatagttaaggactgcctgctatccagctgactctgtcctttataaaatggcctttttccccagcaagacccatataggagccctggctttgcccttccagggatgaagtcccttccttgctccttctaattcttccaagcactagaattctgccttttattgctgccagacctgcctgatgcccagtgtctctatcaccatctgctcctaatccctgatctcgcctaacaccaggggatttctggcctgcctgctcatcccaataccgatctttctgtctagtctttaacctcagctgcctggtctggtcttgattctgacagcacccttgaaatttgttcaagcaatgaataagttattcaaatcctttatttccctccaagggagaactaggaagccagaccttataaagccaaaggaattcctgttgcccccttactgcaataatttaatctctaagaaactcaaaaaagcactaaggaaataaccctctaatcataaacaatccctctccatcaagagaaaacagacctctcctgcctggaattgcttaaacaggagtcttccatttcaccagagctccagggacaaaccagccaccagctaccacaatgggctgcaagtttcagaaacttgcaaaggggaatttttcatcctgattattgcctttgcagtgttctcagctgccagcatgtgatggagggcgtgggtatgagcctgcttttgtgttcttaaataaggctaagaggctgttctccttcgcttcttagccctagacactcatcaatcaaccagatttcctgagtgcacctactatgtgcaggtctttggaaagcaagtcacctcctatgtactttttaaattttttttttttttttttttttttttttttttttttttttttttttttttttgagacggagtctcgctctgtcgcccaggctggagtgcagtggcgcgatctcggctcactgcaagctccgcctcccgggttcacgccattctcctgcctcagcctcccgcgtagctgggactacaggcgcccgccaccacgcccggctaatttttttgtgttttttagtagagacggggtttcactgtgttagccaggatggtctcgatctcctgacctcgtgatccgcccgcctcagcctcccaaagtgctgggattacaggcgtgagccaccgcgcctggccaaatttttatttaaatgtttctgcatacagagtgggtttatatgtgtatagggtacatgagatgttttgatacaggcatgcaatgtgaaataaacacatcatgggtaatggtgtacccatcccctcaagcatttatcctttgagttacaaacaatccaattacactttttaagttattaaatatttttaaatatacaattattgaccatagtcaccctattgtgctattaaatactaggtcttattcattctttctaatttttttgtacccactaaccatccccacttcccttctgtccccctactagccttcccagcctctggtaaccatccttcaactctatgtctatgagttcaagtgttttgatttttagtccttttgtactttaaaaaatattggagggaagctaataatcaaggcaaaacaaataaagttctgatgctgccaaagcagaagggactttcccaaggtcacagagttcaaaaggagcagatccaggatttaattacatcaccctgtgtaatacagattgtttgacacatctcactcagttcactggaacttggcctgttccagcttaatctcatgccctctgcaaatcatactcttggctccacatccgtccaggttcctagagagcagcctctcattctgatctccaggcctttgcacaggctgtttcctgtgattgccaccctccatccagcctctatttcttcacttgactgtttgcttgccaccctttcattctctgcattaaccccactgcctcagaaagccgtttccaattccccagtctgtattggcggccctcctcttttctgctctgtggctatcctatcacggcactttccacactgcactgtaattgcctgtcctcacgtttaatcccctaatatgctgagagaccctcaagggcaggacccttgtctggtttctctctgaatccccaggaccatatgtaggatttagagcacaaacgtgacagtgaatttttgttaaagtaaggtggaccaaactctctctttaccaagctgcctccctgacaggtcaaatcccagactaaaaatagtagctttgcaactcctggctaatggctccaggcaggcacttctgtcccagagcacctgacctctgatctgtaaaatgttctggggtaacatgtgtcctcccacctttgcctcttacaggctcactgatcatcactgtcatttccctgataccacccccattatgggagaaggaaactttcagttttcatccaatgcagctcaagcatagggtaggccagagtgagcctggagagacaagacaagaaaagtaactctgcttctgccgtcactcagttagtttttctttattaaaagggaactttttattgaagcataacatatacacagaaaagtgggtaaattgtaagtctatagctcaaagcttcacattcatgtgaacacgttcatttcaccagcacaaaactcttaaaatgactaggactccagaagcctccgttttgtccccatccagtcactactacatcttgacttctatcatagattaatttggcctgttttaaaacattttataaaaggaattttacaatatgtactcttttgtatctggcttcttttgtttatagtatatagttaactttatagttggtgagattcatccatgtggttgcatatcattttggtatatgttctttctcatagctgtataatattccattgcatgaatctaccgcttttcatttatctatcctattatggatgaacatttgggtagtttccagtttggggctgtaatgaacagtgctgctatatgctatatccattcatgtatatgtcttttgataaatatacatttgcctttctgttggttagatactagatgtggaattgctgggttgtaatgtaagtggcttagctttaataaatacagctaaacaattttccacaccaaaagagatctaattaatctacatccttgcccatacttgatattgttgatatggttttgttttgttttgtttttccactttaactactggatgtagtagtgatatcacgttgggattttgatttgtacttttttgaattttgcctagtgtgttgtcattgaccatttggataacctgaagtatttgttcagatgttttgatcgtttttctttttctattatattctctgccattttcttattgacttgtagtaattctttatatagtctagataaaagtcctttgtcaattatatgtattgcagacatcttctcccattctatggcttgcctttttacttttctaatcttttggtaaatagaggatttaatttaaatgtggtccacattatcttttttttgttcatgattagcaccttttttgctccatttaagaagtttttgcctacctcaaagtcgtgaagatgttctcttgtatttccttccaaaagcttcatagtttttatctttcatatctagatattgaactgatctgtaattgaatttgtgtatggtgtgaggtaggagtcaatagtctttctgaatttttttttacaggactattgattgaagtgtccatctttttcccacttcattacagcattacttttgtcatacatcaagtgactgtacatctgtgggtctgtttcaggactcttctgttcttctgttccattgctgtatttgtctgccctgcaaataatacactgtctttattatggttcctttacaaaaagctttgatatctgggagtgttctctgattttttttcttcttcaagattatttggctattcttggtcatttgcatttctgcataaatgttagaatcatgatcgatttatatttttaaaaaacctgttattgagactgtttttgaactcatagaaaaacgtggggagatttgacaactttacattattaaatctttcaatcaatgaccatattattccatttatttagttttactctaagttctctcaataatgttttatagctttctgtggataagaagtcttgttcactttttcatgagatttattcctgggtattatatgttttatgctattgtgaataataactttttaaaatttcattttccagttgtttgtcactggtatataggaataaaattgacttttgtattttgaattaattttcagagactttgctaaattcacttattgcttctattactttgtatatagattattttggaatttacgtacacaataagttatgccaataattcccttctaatctttatagcttctctttttccttcttgccttattgcactggctattacctctacgatgttaaatagaagtggcaataatggacattcttgacttgttcccaatctcatggggaaagcttttaatatccatcattaagtaagattattgctatggcttttttgtaaatatttttatcacattaagaaagtttccttctattattagtttgctgatatgttttcttatgtgaatgtatatcaaatataatcagatactttttctgtgttctatgaacatattcatgtaattttttctgttaatgtgatgaattgtattgattaaattttgaatgttagactacccttgtattcttggaataaaccctacattgttattatatagcatactttttctaatttactggatatagagtttgctaatattttggggttgctacatctatggtcatgaaagagattgggcttccatcttaacttttacctcaattttgagatggatttttttctacctgggctgacccctcttttgtcctatatatagacttagttaaatagactttgcttctattattagcttaacaaacttcacccagatcctctagtttatttcttattgacagaacaaaagctttctcaacgacaaactagtcatgagccaagtcatggtccaaccactccctggcagtgtgtccactgtcacattatagatcctccctgagcctgtttccttatcaatgaaatagcattgaaaaagaagttagacaatgcataataaagcacctggtacaggcaggtgctcagtaattcccatttctcactacctcttctcttctgcttaaaaacttttcaaatacagaagagcattggcttacttatttacagggcttagccatcagagttaagattgaaatctgaaaaaatgaactaatgggggtgggagatgtccattctttttgttatactctaaaaaacaaagcgaagttgtttactgctcctgctaagcttctttaaatacaagctcctagatttttaaaattagataaacattgctagaatttatcatctgtagtgctacagttccttccctggggcttcaaactcaagtgttagtggagtattacacatttggaagttgtccaggaatatagcctctctcccacatttaacaatgtttatgtgtaaaagtcagcttggaaggacacctttaaataatgctctttctggatatataattgcagtgttacttgtcagtgcataataaaccatcaaccagcctttattgtaccagtgggaatgagagtttgagggtgccctgaaattatgttctttgtgtctgagatgagaattaggttagtagctaggctttatttatagatatccaaataaatcaggagtcagaagttcagaaagactgggctgggaaggctgagtccaaagaaggctgaagtctatgaacaccaagagtcaatacccctaatgctatcaaggacactggataggtcccatcctacttctccccattatctccaccccaagaactaatcccggtgacaggcatgagtgacatcagaatgaccttctgactaaatctgaacttggctcaagctgtggatccccagtggagtagaaagggcaaggccttaaggttggcagatcaatggcaaatctcagccctgccacctacttgcaactcagttctctcaccataacatggggatggtaactgacctacctagcaagacaactgtgagaatggaagggtattagctgatacctgtgaaggacatgatgcagggaacatgctcaataataaatggcagtgattgtgatgatagtgatactgatgaggatgagacaatgacaatgaagacaacatctctagctttgaataaaggggtggtagaggattacctatattatgcttatggaaacaggaggagcatccctaactgccttttttctaatccccacaattattttatggatctctgggcccagacacatgatcttagttggacaagccatgtctcaatttgtgttctcctaaaagcaggatctgaggcaaggactgcaggtacttcgtgtagaaggtgatagaggaagcagaagtgaaggaatagggagagagtgacaagggaggaggaagggtcaaggtaagagtgcattattcaggtcactggcatcagcgtacctctgagaggtgtatagaatgagtccagaattgtccactttccagaattttctactagcacccaccccctattgaccaagggttgtctgcagtagtgtgaacttccccacactcccaggcacttgcttgctggctaaattgactctcaaagcttcagagaaggccatgagtcagtcaacaggaagaggcccttgaggtagacactcactgatagcattagcaagtgctcactgctgcctgccatagttgtggctgaaattggaggtggatggagagtctgtgatacagggcaccaaatgtagctgctgcaggccaagtcttagttcaagtgcagactcctcctgcaagctgtctacttgccacatgtgatacacaattgtgagagtcccccgtcgtcagtagagtctttcctctcccatccccttgtgacagaaaggactacctgcacagttggttcttatatttagcagtacacaaacgtacaccaaattctagagctgtactgtccagtacagtagccactcgatacacttaaattgattagtttatttaaattaaataaaatttaaaatttatctcctcagtcacactggccacatttaagtgctcagtggccacatatgagaagtggctaccatattggacagtgaagtatagtatacttccaacttcttggaaagttaaactggacagtgccactcttgagagagtcagtctggatcctaatcctggctctaccatatactagctgggtggccctgggtgagtcatttaatctgtctgtgctttaatttgctaatctgtaacatgagtttatttccatgattaaataacaatatgtaagcatatagtaaagtctcactacatgttaatgattattatttcccaattcccagggtaatatttatgcaaggcaggaagtacttaaagagcctccaaccctgattcaggccctgggtcccttgaggctactctctgggcttctaaattatctctgtgctcaatatggccatgcccatatacctcccagtctccaaacagggatgttgctttagccctcactgccttttcagcttgtcagttccccaccctaagtccagaggctggagctggaacagtcacccccagcttatgtcaggagccctactgcctgcttctggaaacttctgtctgtgtgcctgactcattctgtcaccattttcccaccacttgcccaccctcccaatgggcctctgcactcccaatgctgactatgacctgaactgaccacctcactttaaaatgcttgctgtcctctaagaccttgtcctaccctaatggacaggtcctgtgcatgtcctggtttgctaccaatttctatctttcctagagaaataaaatattaatatttaaaataaccattattgaatgttttcttgtgtgccaggaactgtgctaagggctgtaatatggatttccttccgtaaccccatcacaaccatagaagataggtactattattatttccatttcacaggtaagaaaactggatcttagagaatttacatagtttgttcaagattgcacagcaagtatatggtgaaaacaagaatgtgatgaaatccttaagccagtaggaggtccttttcttctttcaagacaattgaaaagaaggagggactgatgcatacaacaacatggataaatctcaaatgcatgatgctaagaagtcagactcaaaaggctacatactgtgggagaccacttatatcttggaaaacttaaaactatagggacagaaaacaaaccagaggttgccaagggctgggagtggtggtggggttgttacatgggaatgtgggtaggtaatacaactattcattatcttgattatagtagttactatgtagttgcctgcatttgtcaaaacttgctagactttacattaaaaggggtgaatattactgaattcaaagcatacttttatttttaaatggaaaataaagaagatagagagtaattttcctctgaatgccccccagcaattgttcaaatgtgggaatagaggggaacaaacatcagtttaaagatttggtggagaaaataagctcgggttcagattgcaaggaagataattcaaggagaggaaatggaagcagtgggttcagactgaccttcctgaaaagcctggaggtgcaggaaaggcaaaagatgggcttttgtgagaacaaagcattgatggaagatttttttttcacccagaatgagaaaacttgaacctctttacttaaagggagaagctcttcagtgaagaagagattaaaggtgcaccttacccacatatttcccatttccagcactctttattccttcatgtagatctgtatttccatctgttttcattttccttcagcctaaagaacttcctttaatatttcatatactgcagatgtgctaataataaattcacacagctttcatttatttaaaaaaacgttttatttttaccctcatttttgaaggatatctttgcaagacacagaattctaggctgacagtttttttttttaagctttaaagttgtcatttcattgtcttctagtttgccttgtttttgaagcaagtcatcattcttatctttgtttccctcattgtgtcttttatcgctttttgttgctttgaagattttctctttttctctagttattagattatgatgtgcttaggcatcattctctttgtttttattctgtttggggtttgttgatctgggatctataggttggtatttttcttcaaatttgggagaatttcaggcattgtctcttaaaatatttttttttatttatttatttattttgagatggagtcttgctctgtcgcccaggctggagtgcagtgcacgatctcggcccactgcaagctctacctcccaggttcataccattctcctgcctcagccgcctgagtaactgggactacaggcgcccgccaccaggcctggctacttttttgtatttttagtagagacagggtttcaccgtgttagccaggatggtcttgatctcctgacctcgtgatctgcccgcctcagcctcccaaagtgctgggattacaggcgtgagccactgtgcccggcctgtctcttcaaatatttttctaactcaatctatctattctctccttctggaactccaattaccactatgttaaaccacttgtttttattccacagtcatttataccctagttcatttttttcagcccatttttctctgtgcttcattttgaattgttttcatcaccctatcttttagttcactgatcttttcctttgctgtgttcaaatacagatattatatttttcacttctgaaatttccatcagagctttttaaaatagtttttatttatctaccaaaattccctatctgttcactcattatgtccatctttaaatccttgaacatattgataatagctgttttaaagttcttgtacgttagttccacatgtcagtcatctcaggaactcctgttattgactgtggggctttttcctgatttggggttacatttcctgcctttatactgctcttgtaattttttttttttttttttgagacaggatctccttctgtcacccaggctggaatagagtggcaatcatagctcacttcaaccttgaactcctggaccaagtgatcctcccacctcagcctctggagtatctgtgactacaggcaggcaccaccatgcccagctagtttttaaaaaaattttgtagagatgaggcctcactatgttgcccaggttgatctcaaactcctgtgctcaagtgatcctctcacctaggcctcccaaagtgctgggattacaggcatgagcaccatgcccagccatgtctagaaattttttattgcatgatggacattgtaaatactacattgttgagtgtctggattttttatcttcctttaaagagtatgacaaatggttaatttactgatggatctgcttcattcctttcccaggcctgttttctaagctgtgttggggtaagtctagagtagcctttactctagggctaatgtagttttgctactaaattgtagcctttctagggtttcagttgaacatatagtgttcagcaagttctctctaacatggatgggtagatattttatatctctagcattgtgtgacctctagaatctctattcagctcttagctccccaggggctgttctctgccaggccttgtaaagtgtcaccctgcacaagtgaagcttagtgtttggtcaaagatttaaggggacttctatgcatattctgaagttccatctccatgcagcttcctcctctctggcattctagcccataaatcctatctactttaattgccccaaattcttacctctacctcctcagctcagacagtttaccatggtcagttctactccaccttcctgcaccacaaacaagaaagtgtctgtggcagaaagcctgggcaaacacgggctcatctcttgtgtttcccttctgtcagtgatcatagtcctttgcggtctgttttccaacatccgaaaactggtgcttaatatattttgcccacttatagttatttatgtccagagggctaatgcagtgccacttacttaatcagagtcagaagcagaagtcaagtgagcatatgcagatctgggagttgtctatagacaggactatcttattctcttctctgcttcacattgccttaaagataaaatgtttctattaagacagtcatatcctatcatgatctgcctggctgactgatctcatcactgatcatccagtctttatacacacacactcacacacacacacacacgcacacactaccatgacctactcgtagtcttacacatatctctagctttttcttatgcctctgcttttgcatctattattttgtctacaaaaataaccttcccccaactccctacctgccttcctaactgctacttatccttcagaatttagctcacctgccatctcctccaggacacctcctctggaaccatctgggttaagtgcccccttatttgtgctgtgacattctgtgtttgcctttatcaaagttgtatcacccacgctttattgtaattgcctgttatgacctatcttccatgcccttcacaccccaccctccagacagaacatctctaagaccgggatcaagtctgagtcatctcagtgtctctatgacctggcacaggttttgaaactttttgtatgaagggccaaacagtaaatattttagagattgtaggccagacatcttcagctgtaactactcaactctgccgttgtagcatgaaagtggccataaacaatagataatacataaaatataagactttattgaaatagaaacaggcaactgtagcttactgatccttggactagcacatagtataatcccagtaaatattcattgaatgaattaataaaatattattattggaggcctcagaagaaatagaaaataatgtaatcaattttataagtgcaagagttttcctgggaacggaaaagtggcactttccttgaggccctagggaaggaaaaaaagacagtggagtgaagaaggcaggataatagaaaactgggggatttctggcctaaatgacagacttccccatgcatggcttttgccaggaggccattctgggatgggaacctgaaaaccagaatggtctggtcagagtgagttcccaaggcagccaagaacagagaatgccaaaggacaagtacaagctgtgtcctgggcagcacccaggcgcaaacccgcagaaggcatgttttgcagccaaattcaaagtgtcagaaaccaggcaggttctagaactgcatctagcatgaaaataacaagggcaagagggatgtgagatccaaaacaacttttatgaatacaactggcaggtccacaatacttttctgttggtcactggccacattgtgcatggatgagtctgtagatgggttaaccttggctttttcagaagagttaagtgaccagttcatctactaagaaataaaaggaggaggggagcctagaacttagaggctggaggagatctgtcatatataactactatagcagattccataagggcccaatcagggctcaaaacaaagatttgctgaaaagtactatgggtgaggctgaggttagacaacagaaggttgcagcaatctaatcactaaggttgtaggacattctgtagagaagcattatgaatgagtatcaaggaaatgaataggtggcttgctgcagaattgggattggcaggggaatgcagccactggccaggagatccagatagtcactgaatacctgttgtattagtcagggttctcctaagaaataaaatcaatagggtatgtggcggggcagggcggtggtgaagagatttataaggatgtggctaacctgagtacagaggctgagaagtcccaagacaatgcagttagcaagctggagtcctaggggaaccaatggtatagttccagtctcagtgtgaaggcctgggaaccaggattgttgatggttcagttccagtcctaaggccagtaggctgaagacccaggaaaagccagtgttttagtttaagtccaaaggcagggggaaaaaagcaaggttccagcttaaaggcagttaggcagaaggcatttcctcttcctccagggagagtctgccttttatgttctattcaggtcttcagctgactagatagggcccacccacaatagggagagcagtctgttttactctaccaattcaaatattcatccagaacaccctcatagacataactactttgatcaaatgtctgccctccccatagcccagtcaggttgacatataaaattaaccatcactctgccatgtgcagaacacctcagagaatctatctaccatgcaccctgtctccttcaacactagataaaatatcagacagaattatttgattagcactggtgttttaagcatcattgtgaatgctggcaatttagtaccaatgatgacagcagaaaggatgttaggaaagaggttactacacatatactcaaaattatctccctggagtagctttttagacaaatgcacctggttggccatcagtatctcaaacttacatgtctaattatttcttcctcccagcttccccccacctctgggcctcatctaagctattgggaataaataaataaacccagagaggctacttgaactctgctggaaccagtgagggacatgcaaaatcaaaaagccatgtccttacctgaaagccaaaaaggatagtgatagtctgccgcttccccctaggtctgagttcccagtgtttcaccaaagactccagaggctctgagttttcctttaaggccacaagctttaacctcgtctcctttttcccagccctcctgatacctgagtcttttctctctcctcctctatttactagaggatgtggggcccaggtgtaaactttctcgtgtcccagctaactgagatctgcttaaccacctcattctgcaggccccagatcagagtcccatttagatgattccttgactccttttttcagattcagatccttgcatgtgacattcctgtcatctccacacccctccccaatcacccaatcagattctctttggttaccatgccttacagaaatgtgtctgcattttccctgctctatttagatttaattttactagctaatatttattgaccctattttatgcgccagccactagtcactatttcatggacttcagccttggaacaacactaggaggctgatcatattactatccctattttacagatgaagaaactgagattgagagtgactaactgatgtgtttaatgtagaaagtttcagaaccaagactagaatatacatagatctgacctccgaaaaaaaaaaaaaaacccagttttaactactttaccaaaatgcctcccaaggactgttcagtcttctgtcttattgtctcacactcctggccccttgtccccattccccctaccactgccctaagtcagacactgcatgattcatgaagggaatgtcaaagggccttctatttggtctcctcaccttcagaccctctcccttcctatccctgggtatgtcctaccaaaggtatggtaccatgcagcagagaagagctggtctttggctctttgactcaactttgaatcccagtgtcataactcgcctgcctctgcatttttgggttaactgaatgagaatagcatctgtattaacagttttctttttgagcgtttaatgagataacataggtcgagaccttggcattgtgcctgacacatagtaaagtctcgtgtattagtccattttcacatgatataaagaactacctgagactctaatgtaaaaagaggtgtaattgactcacagttccgcatggctggggaggcctcaggaaacttacagtcatggcagaaggtgaaagacaagcaagcaccttcttcacaaggtggcaggagagagcaagagtaaaggggaaactgccacacacttttaagctatcatatataataagaactcactatcatgagaacagcataagggatatcacccccatgatccaatcacctctcaccaggtccctccctcgacatgtgggaattacaacttgagatgagatttgggtggagacacagagccaaaccatatcattctgtctctggaccctcccaaatctcatgtctttctcacatttcaaaacacaatcatgccttcccaacagtcccccaaagtctcaactcattccagcactaactcaaaagtccaagtccaaagtctcatctgagacaagggaagtcccttctgcctataagcctgtaaaatcaagagcaaattagttacttccaaggtaaaatgaggatacaggaattgggtagatgctcccattccaaatgggagaaattggccaaaacaaaggggctataggccccatgcaaatccaaaacccaaggcagtcattaaatcttaaagctccaaaataatctcctttgactctgtgtctcatatccaggccacgtcgatgtaagaggtgggctcccgaggccttgggcagctccacccctgaggctctgcagggtacagcccccgcggatgctttcacaaactggtgttgactgcccatagcttttccaggtacacagtgcaagctgtcagtgaatctaccattcaggggtctgaaggatgatgaccctcttctcatacctccactagacagtgtcccagtggggactctgtgtggtgagtcttcagccccacatttcccctctgcatggccctactagaggttctccatgagggctctgcccctgcagcaggcttctgcctggacatccaggcatttccatacatcctctgaaatctaggcagaggtccccaaacctcaattcttgccatctgtgtacccacagacccccaacaccacgtagaagcagccaaggcttggggcttgcaccctctaaagcaatggctcgagctgtaccttggcaccttttagccatggctggagcttgagcagctgggacagaaggcaccatgtcccaaggctgcacagaccagcagggccttgggcctggcccagaaaaccattttccctccttggtctcccagcctgtgatagcaggggctgctgtgaagatctctgaaatgcccttggagacattttccccattgtcttgactattaacatttggctttttacttatgcaaatttctcttgaatttctccccagaaaatgttttttttttcttaccacataggctgcaaattttccaaacttttatgccctgcttcccttttaaacataagttccaatttcagaccatctctttgtgaatgcatatgactatatgcttttagaatcaaccaggtcaaatcttaaatgctttgctacttagaaatttctgctgctagataccataaatcctctctttcaagttgaaagttccacagatctctagagcagaagaaaaatgctgccgctccctttgctaaagtgtagcaaatgtaacgtttactcccgttcccaagaagtttcttacttttatctgagaccacttcaacctggacttcattgtccatatcactatcaggattttggtcaaattcactcaacaaatctccaggaagttccaatctatcccacatcttcctgtcttcttgtgagccctccaaactgctccaacctctgcctgttacctgcttccaaagttgcttccacattttcaggtatctttatagcagtgccccactttgggtaccaattttctatattagtccattttcacactgctataaagaactacctgcgactcggtaatttataaataaaagaagtttaattgactaacagttcgacatggctggggaggcctcaggaaacttacaatcatggcagaaggtgaaggagaagcaggcgccttcttcacaaggcagcaggagacagcaagaatgaagggggtactgccacacactttcaaaccatcagatctcatgagaactcactcactatcatgagaacagcataagggaaactgctttcatgacctcccaccaaatctctcctgtgacatgtgggaattacaactcgggatgaaattcaggtcaatagtcaatagtcaaatagtcaatcatcaaatagtcaatcctcactataaccttatcctcatgttacatatgaagaaactgaggcccagagagcttaaggaatcagcccaagctcacagagcaaggaaggagcaaaactgaggttcaagcccaggtctgcctgactccagaacacatgttcatctccctacatcccactgtgaggtcatgatacagaagagatgattggatggactctggaaacaaagaaattagatgaaaaagaatttcagggctaggttgtggtgggtgctgagtgcccttggtggtaaatggcattggaaaagggggaaacatgatcaaaagttcctcctgcgaagaatgacataacaatagttaacatgtattaggctgatatggtttgtctctgtgttgtgtttgttctcaaacccccttataccagttattctgacattgtgcttacataatttagttaaatcttttgaaattgatgagatatgagtgagaaaaggaaggcattttttatggctgctctgaaaggactcaacagaggcaagttgtcaaaactattgtcaaatagtttaaattaaatcagataagtgtaccttcaatcagaaatataaatcatgccaataatttatcacccctgatttccagtttaggcttcttgaaaatgaatctgtacttaaagatacttgcagaaccttctgagtatagaactcctgagttttacaacttttcccaatcttttacagatatcttgctctcacctaattatatattattttcagcaacttgcctctgttgagtcctttcagagcagtcataaaaaatgccttccttttctcactcatatctcatcaatttcaaaagatttaactaaattatgtaagcacagtgtcagaataactggtataaggaggtttgagaacaaacacaacacagagccaaaccatatcagcttaatacatgttaactattgttatgtcattcttcgcaggaggaacttttgatcatgtttcccccttttccaatgccatttaccaccatcggcactcagcacccaccacaacctagccctgaagttctttttcatctaatttctttgtttctagagtccatccaatcgtctcttctgtatcatgacctcacagtgggatgtagggagatgaacgtgtgttctggagtcaggcagacctgggcttgaacctcagttttgctccttccttgctctgtgagcttgggctgattccttaagctctctgggcctcagtttcttcgtatgtaacatgaggataaggttatggtgaggattacacataggagatcatcatcctaacacctattagatgtttgagcctagcatctgtattgttcattgaatccctgctccgactagcctgccagtcctgcgcccggcaaactatccccttttctatctatttctttacatctctaggcaccctccttccaactggaaagttcccttgctccaccaccttcttttggattggtgcttcatatctgtaataatactgagagctttgttttgtacaactctttacagctttcacaattctttcgaaaactatctcaattaatttgtacaactctgggagattctccagcttggtaattattatttctatttcttaaagggaaactgaggctctgagagattgaatgactggtttgtggttataaatggggcctggagccagagtcttctggctcctggtcaccatgcctttcttccctgcaccattttgcacctgaatgactgctgctcacctgacatcaataccctttgtaatgttgcaaattgtttttccataggtgcctgtcttgtcccccgagggcagcgacatagtcttattccttccccctggccaagtgccttacaaatatctgttatttggttgatgtcattaaatgtgttaaaaatttgaattaggtcgggcgcagtggctcacgcctgtaatcccaacactgtgggaggccaaggcgggcaaatcacaaggtcaggagtttgagaccagcctggccaacatggtgaaaccccgtctctactaacaatacaaaaaattagctgggcgtggtggcggacgcctgtaatcccagctactagggaggctgaggcaagagaatcgcttgaacctgggaggcagaggttgcagtgagctgagattctgccactacactctagcccaggcaacagtacaagactccgtctcaaaaaaaaaaaaattgaattaatatgttatgttgtaaggccattgtaggaaactaacagctgtattggctaggaggttgaacttgtgtaattaaattttatttaagagagagaaccataaagataggtcccacgcttgaggtgcctgtttctctgcactcgtgcctttggactttgattccttggatctggggaatttggagttagctgctccatcctctgtgctctgcattcttgtgctataaaaaaccctgaccacagtggattgtaattaatccgcttatccatctgtttcccctgcccccagactgtgagtcccttcagggcaacaccatatccagtcctcctcagtgtccagggcccgccactgtgcttggcacataatggaagttacaagaataagccagaaaactccatctgggtccctcccctaatcccctaggattgtacatgttcccattatcttatcatacatatttcttatctcttatactgaattaaaggcaagtttcatgttttactcagttttgtagcctccctaccaaccatgaaaggaagaaactataattattgactgtctattgtgtgccagtagtgatttcaatatattatctcacttttaaataatttaatttaattctcataataggttgataaggtaggcattatcatccctgaattacaaacgagggaactgagactcagggaaataaagtaattgaatttaaccaagtttacaaagccagtaagtggtaatgctaggatttcagtccctgtctgctggctctaagaccaatgcctttcttttttgttgttgctttttgttttttaacagcacataggatactgccttagcctagcaggtgtcaggaactctgctgaaataagacttgaatttaatcacggtgaatcaaatctgtgcaagcctgttcccaactatgtcaagtgcatatactgctgccctcccatttgattgtttggatgaaatgcttctggaaacatatactgagcactaacaacacactaggcacagcactaggtgttgggctgaagtcaggctccctcaagaaacgttcagcctagtgagataacagactgtaagagtgataataaatgtgatttgtgctatggcaagacagaagacaaaagtttaggttggcttgtggtggtcttgagtaacttctgagtattttataaaggaggaatgggagttggctaagccaaacaagaggagagtacagagcaaagagcatatggtaattctgcactaaggtacagaattgcaggcaggacacgcctagaacaaggagtattttggtggagaagggcagggagagcaagagtttctgaagctgcttcactctgtgtccacatcacgaacctaaggccattactggttaccagccattgcccctacacaagtgtactttggctttgatgacggctaggactcttcacccaggaaatgagttagagaaacggctggcagcatctctatctgtctactctagggatatgagagatgaaggataaacatggggtctgcattttcccgatgtgtaggaaataatgaacaagcaattgggcaaacccgcatggtgatgtcctctgcctggggtgggccgtggctgccctcagcaggccaggaaggtgcggcctggctttacacctatgttcttgatgtggccctggagcagagggccatggggaagcgatgtgagctgtaaacagaaccaggccatgttcagaaccactttctttctttcttttttttttttttcttttttcaagagtgtttattaaaataggcagtaatggggtgaagagttctgcccactctgggccacaggatgggaaactgaaaatgttagttgggttcacccagttcaagttttcctctttgatatgcctgaaaatgttatttaacttgagactttgtttaaccaaccaaagaatggctgagaattgagccaactgtgtgatgaactaattatatgtaacttagtcaataataaatgtatatgcatctgtattcatcacatgtaaaaaacaaatccagtaaggtgctgatactatcagttccttcttcctccaggacttaaataaaatcctcaagtcaagttctgtcttgctccagcccagatcttactctgttttcccatgctgttgtgttgtgcattaattccctcccacatcccactgcagccaccatcccatgtgatcttcaccaaaccactgtggactggtcacttccacatatccaaactgtccatcacatcctttaaatatagctaacctgcctgccccttgtactgaaatgtacatagaagtcagctgaaatcaaccatgtttacttctaaggctggtccccacacatttcttttatcttttgctccttgcttacctctccagctctccactccaactgtgctctctccaatgcattcttcacactgctgtctggatgatttatctaaaattcaaatgcaattatatcactcctctgccagaacccttcagtggttctcagatcctttcaaatgacatccaaactcctgaagcatttagagcaaggccattcatgagccagcttcttcctacctccctggcatcatctcctaactttccccttgacagtttgtgacacagcaatgctgaattagttatgactctccaaacacacaatgttatttaatgtttctgagtctggtctatggctataccaccctgaatgcacccaatcttgtctgatctcagaagctaagcagggtcaagcctggttagcacttggatgggagtctgccagaacagtcctttctactctattttgccttacaaatatgatcagcctttaacgttctctcaactatccccttctctgagaccttcctagacagaacgcatctctgggctgcctctgcgtcttgttcaacatctgctgttgacctgtctgtacattcccaagacctatttgcttataggaactcagtcttatcactgaatggcacagggcctaagacagaataggtgcttagtcagtgctctttgaatcgatgtccaattacgcatcctccccatcatttaagggactcgtgtttcagccacagccatgctgataactgcctcctgattggctttcccaggtcgggccaaccactggtctgcgatcatcggaggatcccactccaagaattatgtactgtgggaatatggaggatatgccagcgaaggcgtcaaacaagttgcagaattgggctcacccgtgaaaatggaggaagaaattcgacaacaggtaagacaaaaaaatcacagaatgaccaaataacagaaatgcagtcaaagcactccttagatatctttcccaggggcttgaaatttgcagtacaatgtggtggaagaaaatctatttgctgagtttgggggttttatgttaagtagaggacagacagaggcacaaatatccattttgttgtctcagattgtccctgactgcattcatgttttcttcagcctgtgctaaatgctgctgctgtggccatattgttgggatgccttgtctctagtctcctgagagtcaaagccatgaattaaggttttcttactgtgatctttgagagggtcagaggagtaatagtcaagctgtccagccaaatccccaaaataaatgtttgagtattggcacgtgctttttgcaactatgtcttgaggtacttgataaattagtcgttcgttcatcataatcattatggactgaggcatcttctgtgtcctatgctgtgtgggcccaggagcagtcccactctctaggccttcactgatacctctgtgagataagggagaaaaagtccataattcttatcaattcatttggctgacagtgccatcgtccttcatcaaaagcctaatcaggttgacaccagagagaggctaatgagagaaccttggaagaagagccacgtggctcagtggtggtttgctgcaagacatggcagtgcagctttagccatcactacccacaaaagcctgtccagcctgagagagcacatggcagcatgtcccactgcccaccaagtgctctggaggaagtaaggaaagagcaaagcatgcttgggatgtgatcattttacaacacaggtcactgagaggctgttgccctccctgtgctcctgtcccacatctcctgaaacaatgcaggaggctaagaaaacaccagggaccccatctcacagtctgcatgtgcccagaggcctgagcagcacagcagggcaagcacagctgaggcccgcagtgttccccaccatctggactccaagctgcccacagaccctaaattggaggcaacaaaggtcactctgactcctgctataaatcccctgaggaatcagtttggactagagtcgaaaaatgccccagaatgagcttatgtttcttattaatttgatttgaagtctttcctcctttcttggaaaaaaagatgtttgaccagatgttttaagagtgcatgctattcatccaagatgagctatctaactatgctctgtttctctgactctggctgccatgcctcataattggcatcactccttcagactatggcaaagtcatgcagggctctatattggtgctagtctgtctggcctatcatgggggaaccattgtttgggatcctggaggttcacattcccagttctcaagtatggaattatgcctccctgatttgtcaagctccatggtgtggaatcttgaaaaccttttgttacaaatagtagttgaaatactaaagtttgccagttaattacatcagggtcaagggcatcttcataataatgtcagtctcacttgttggctttcttgagaggtttctggaaaagaaagaatcctgcaggaatcatacataactggaactatattgtgctggtgaacattatctgacatgtcatagcaataaaaagattgaaaactcatggatgggaccccccaccaccaccactgccagcctcagaatccctcttaggaaaaagttctttggtatgttcctaatcagcatggctgtgattggcttgtattaccacacaggcaatgtctgtctgcctatcccagctggctagtgtttcagacaaacagtcgtaataataagtttaattatgggtaccgcacatgggaatgaacatatctcagtgcctgtcaccacctttcaggccccctgggtgctggatatctacttttcgcccccctcacatctaggctgaggatgctattattatcccagttttacagataaggaaaccaaggcatggtcaacagcagagaataccaggacttaaacctaagtctgtctggctccaaagcccagacagtactagacatataatctgctccgtgtaaacctgaggccacttgtttgaaacttgttgagaatctcaagatggcagtaccgtgaatttcatagcatggggtcctgtgagcctgcatgggtcacctgcccctgaagccaggcctacctgtataatttccctgtcccacacagctgccccacagagaaattcctcttgccagcctctgaatctggcctctgctaacagtgcctcaggttccccagctcctgggaaagtcagttggatagggtgatttcaggattccaaataactcatctttctaaatattgttccccgcaagcacacaattgatttatttttttgtaagtcaggtaagaaacaacattaaaataagcaagaatatgaatcctcctagaatacaaaagtgtcctctgaataaccagaaacttgtttgaaaacatctgcaaactaacacagtgttctcgggctttaatactttatatcctaccaatcactttgtcaaagaacctgagtccagccatgatgaaaataaaaagccctcttttctcaagaaagacatttatatgcttaccagcattctcttattataaacttacggctcactgcaagtttcaagggcatgaagaatcacaatagatattcttggaggtaaattttatgctaatggctttcaagcacaaatgaacaaaaatactaatcctattaatagtggaagtattaataataataacagtatattaataataatactgttgagtataaattttaatgttactataactgcaaaacaccaagaaaattaatgaaaaattacagcagaattattggcagtagtgacactagtggctggggctggggaaggccacaatgctcaccctttcgtggaaggacaaaggcaaatgtgtcctggtggccaggacacctggggactgggaattagaaatactgagctatggctagcctggcaggtcacaaatgggtaatccaaggcaggcgggggctgtaggaaatggtagatcacacttgtaggttggtgtgggagtggaaagtgagcttatgaatactcgttatgaaaacacttcatcccactaagaccatttctacttcagtaagcccatatttctggcatgtttactaagtgtctggttctctgctggatgctggcccaaagatgatgcccctttcactcggttattcaggctagaatccttgatctctccacacccaaacttgtgccttctcttttaaattcatccagttcaatctgccctcatcaccacctccctccacttatctcttgcctaaattgctgcactagcctcctgatgcccctgcctctgattctcctcctgttgcccatgctgccccagggccatctttataaaaaacaaatcagatcatgccactcccccacttaaaatgtttaatagcttctccttgaccctaagataaagtccaaattccttatcaaagcctgaataccctttatgtcctgcccttgtcttacctctccaattttatttcttgctgcaaatctaagttttgggcatacagaacctctttcagtctatgcacaagggccatgcccttcttgtctctggaccttctctcagccagacatcttccagcagccttctaactggtgaactcctattcatcccttaggacttagcttagatgttgcctcttccaggaggctttccctgattctgtactaaattgatcttgccaggtgctctcccagcactttgtccttctcctattgttagcatcatcacacttacatatttctttgatgtctctccctcactaaacaacaaggtttaaagctgccgttcccactattatatcccctgagcttggcatagtattggatgcttcctaaatgtttcttgaatatatagtttgttcattcaataactttataaatatttattgaacttattagtttattcatttggtaattttactgaacacctactatatgctaggcattggagatgcagcagtaattaagaaaactcctttccttcatgagcctacatcctaacagtggagaaaaggaaaacatgtaaaatatatatatatatatttaagtgaaaagaaaccaacaagggtggtagtgacataaagaggattaggagtagggaggggcctgttttagataaaccggtcagggaaagtctccctaacaaatgaccatgaagcagaaacccaaaagacaagtgtaggggaaaatcattttagatgctaacaacagcacatgcaaagggcctgtgggagaacataacttattgtgcttagaactaaaaaaagactagtgtgacacaaggatagtgaggggattgtggcacaaaaggaggctggagagttgaatgccggaccactttgtctctactcagacgaaattaacaaagtgggagaggcacatacatgactatttccatagaaggtacttattccttaggggaatctgtgcatccattggggaaatgtggacacacatttgggcagggccttgttgggtttcctctctgctggagtctccttttccaatccacgtctgcttctttccactattctagtccttcattagggctacttttatgtcttcaataattttaaatatgtctaattgtctctttcagattattctattttctcataatcttagagactatttttccttttcattgaacttgctctctcagtgacattagtttcttctttggttttaaattgtttgatcatcttcagtggtatttgttttgtttttttgagatggaatttcactcttgtcaccctggctggagtgcagtggtgcaatcttagctcactgcaacctccgcctcctgggttcaagcgattctcctgcctcagcctcctgagtagctgggattacaggcgcctgccatcatgcccagctaatttttgtatttttagtagagacggggttttaccatgctggtcaggctggtctcgaaatcctgacctcaggtgatccacccaccttggcctcccaaagtgctaggattacaggcgtgagccaccacacttggcctcagtagttttttttctttttcttttttttcctgttggaggaaaaaaggttcaagtgatggtgtctttacagtgactttgtattttcttctcctggtcccacccaagtttttatgtcctttctcagattggaattgcccactgcacagctagtatacgtctggaccctgcactaacacatgagagcaattgggagttccatttcttggaggtgtcttgggcagaaacaaccttccttgccatgttcccgaatgcttgatggagggttttctcatgccctattcacaaacagggcagccctttaaaacatccactgtatgcaggcgtgccccccccatgccccacttctcactggctcaagatttccccttctctccatgcatgggcttctaaacccccgcctccagctcctggggcctgtatcccagtccagggccccaacagctcaccacgcactagctcctgcttactgttctgagttagactttcctccctatttctggcatctgggcagtttttctaaacttgtttacatatttttgtaatgtgttttgttatatttgtccagcatttctatctgtttgtagaaggagagagaactttttgtgtcagttcagttttccacattttcaggtatccagctaatatctgtagcacctaacaaatatctgaattgatgacaagcaagccatgaatggttcttgcataaaactctgagctttgaagagtcacccatttattaaaaatccattagaaaaatcattccaacttttatatttctctggattcaaggctttcctgaccataagaggtcagataatggtggaccctaatacaggcattgattatttcaccttcaggagaccttgttttggaggatgacttgaaccagcccacaggattatcacaccgcctgtggcatgagaagcaatagacaagcagatgttctttttctttaaagttgaaacagtttatatggctccaggaactggaagaaaaggtttgagaattttcttttctcatctcctttaaatcattggagatgacatatgtctactaaactattgtttttttctgatttttgattttctaaatttttaatcacttttctttaattaaagccatggcctgacttcaagtgttctctatgattcatgacatgctgcctcatccggtttggaaaaaccacacacaaacacacacacaccccaccagcttttatttataataataaagctccagtgatcttccatgcttatgagaagtagtgatgtataatgtctaaaagcattgcctctgaatcaagatttcctgagttcaaatcctggctccatcccctgccaactatgtgactttgggcaagttacttaacccctctgtgtctcagttctctcttctatgagatgaaaatggcgattgtgccaacctcatagagtcattctgaggactaagtgagctgataagtgtaaagtacttggagcagagcctgcccttagaaagagattgctggatgttagctatcattaccatgttttcattcttcagcctctgtttccttatcagtaaaatgaggggtttgtcctaagaccccctgcaggactagaaaatttaatgttcaagttcgtgtcatttctcagtgtgaaaaggtccagaggatgaggccacaactcctttaccatctacttcaactacttcagcatccccaggcactgcccaagcctgcccctcctatccccacttgacagtgtcatctcccaatttgccctaacattttttcccaaagttgatcataagcaattaagggtataaattaagccttcaaatatagaaagagctacagtaaaactccacgcccattcccaactcactgctttgcacatgctccctcccttccttggaacagcctcatcaggatgctcgctggagctagttcgatgccacctccagaacagccctagaggcagccatggagcacatcttcctgaatgtagcaagacacaagccaaggggcagaaatgtggctcccaacctaaggagagaggtggtttagtgaagtctagtttgattgtaacaggaacccactgaaactaacttaagaacaaaggaaactttattgtagaaagaaagtaggacacatgagaacacaagtttgtgcagagtacaaaaaccctcacgaaagctggaattggaaggcatcaggctgagacgaccactaactctctctccctcctccacactgcccccagtgtcaggtggtcttttccatgcccttccatgcaaatctctccccgactatttctcaacagagctgctgcctctgcttacttgggttgcacatggccccaaatggtagccataggatcttcctccttggcttctcacagctagctgagcagttttggtgactcttagtgaagcaccagaaaaacaggttgatcactggatagcctgggcaatggtgccccctgcatcagatatctacccttactccaatccagtggccacctctgtgtaaagaaccatccggcctgttattatatccagtggctgtgggcagggcagtttatactaagaagggaactgaaggcctgggtgtggtggctcatgcctgtaatcccagtattttgggaggctgaggtgggcagatcacttgagctcaggagttcaagaccagcctgggcaacacagtgagcccttatctctacaagaaataccaaaaattagccaggcatggaggtgcacgtctgtagtcccagcagttgggggactgaggtggaaggatcacttggcccaggaggcagaggctttagtgagccacgatcacaccactgcactccagcctgggcgacagagtcagaccctgtttccaaaaaaaaaaaaagggcaggggaaactgaaggtagaagataaatttatatttcagggcagcagtggatgggcaagaattagactgagttgcagggccctagccaaaggacaggagctcagggcaggatttcagtcctgtagaagagaggggcactgaagagagaagaagttcaggagcactaaagaaagaagagggaagatcagcagaaacccagagttcagagctgcaccaattgggtgacaaaatgctgggtctagagtttggtttagcaattgaggtgggatcaagggacattactaggcctaaacacaaggatatggaaaggcagaggtcagagaaagagtatggggccccaaagcactgttaaggccacttatttacccttgccacctgctgccttgcattgttacttaagaaccatgaaaacagtagagaacctgtacttcttaagtctctgacctcgagtaggtcacctaagctcactgagccttagattttacatttgaaaaacaataacaagaatatgaattacctctgttggttatgaaataatacgtgtacaaagcatggcttggagtatgagctcattattactcttattattgcaacaaaaaaattaaattggaaggacttagaacccttttttccttccatcttctaaaagggtatttcggttttactgggtgggaatacaatggaaagaagacataaattgggctaggtagaatctactagagcataaagacaaggaaaagggagaaagaaagatccaaagaagacttttagaccaggcgtggtggctcacacctgtaatcccagcattttgggaggccaaggcaggcagatcacttgagttcaggagttcgagaccaatctggccaacatggtgaaaccctgtctctactaaaaatacaaaaattagccaggcgtggcggcaggcacctgtaatcccagctactcaggaggctgaggcaggagaatcacttgaacctgggaggcagaggttgcagtgagctgagattgtgccactgcactctagcctgggtgaccgagtgagtgagactccatctccaataataataataataataataataataataataatgaaaaataaaaagtaaaaacccaaagaagactttgagtaaatttgatttctaaaagaggaaacttcaaaagagaacttttagcagtatactttgcagaatattgtgtgatgtcattttccctttgctgccttctcaagaaaacttcagcaaagacctctaatactttttcaaggcttctgggagtcagattgggtctgtttttttaggtgtgtcaccctgctgcaaatggcccccaagggtgcccaaccttatttgggttacattgatgacacacacctcctttgttctcccctacctcattcaaggcttaattccatgtagtatgggtaagtgggcacttgtggttggtagaaataaaatgacactcagagtggtgatagggtaaggagtcaaataaagattctgtcacagatactcgatacagaaattaagacattgtttgaaaggtatgatttgagtcatatgaaacctcttgtttgctttcagttgagtcttcaaacaaatccagattacagtaggacaagctgccagagtgatttcgtgatgcctgttctttaataaaactggcacaggctgcctttgctggaagggtatagagctggcctcttagcattacttcttaacctctacagttttataagacagcatcatgatccctgggaatttttctgagaatctctgtatgagagaaatgtgggacagtcttattcaagacttacagaatatttgactcactaaaatatctatttttacagtaactgagccaaaatattgcaaatagaaggcaaatttaagtgagagatcattaatatattaccttaagatttagaagacaatttagcaatatctatcaaaattatacgttttcttttttctattgtagtaaaagaaaacacataatatttaccatctgaaccatttttaagtgcacagttcaggagtgttaggtatattcacattgttgtgtgtatattttccttatacatcaacataataaaataattctatatctaggaatatgtctttctgaaatagtcttgtgcaaaagtatatgaggaagaatattcattatagtattttatttttaagagatggaacaagcaaactttcatcaataggggtcatattagaaactctggatgcatttaacgggtcaaataccatgcagctattaaaaagaataaggcagatttgtgtgtactgatacagaatgctccctggtgtatatagttagatgggaaaaaagcagaacagtgtgtatagcttgattccatatatgaaaaatggcaggttagagtgaaatgattatattcatgtataggattatatatgcatagaatatctctatgaacatacaccagaaactccttgcctctagagcacacagagagtaaggggcagaactgaaaggttcattcacattttgccatacggcctcttgtattgcttgaattttaccatgaacacaaattactatactttttttttttttttttgagacagagtctctgtctgttgcccaggctggagtgcagtggcaccgtgttggctcactgcaacctccatctctcaggttcaagcaattctcctgcctcagcttcccgagtagctgggattacaggtgcccaccaccatgcccggctaatttttacatttttagtagagacggggtttcaccatgttggccaggctggtctcgaactcctgacctcaggtgatccacctgccttggcctcccaaagttctgggattacaggcgtgagccaccacacctggcctactgtacctttttaaaagaataatatttaaatgaacaaagaaaacttggataagaaaccaaatattccccccaaaaaaaatactgcataacttaatctgtaaatttaaagtgttccctcaaaaatcccagataattttttaaaaattatacaggctgacgctatagaaatagaaaactaaacagtcaacaatagtcagaaaatgtttgaaaaagcatataatgaagggaagactggctaaaccagatataaaaacgttataaaacaacattaactaaaactgtgtgaagctagagagtgaatacacagatcaatagaatctaatagaaagtccagaaatagacacaaattctttgtaagttaagtatatgaaaaaagtataattttatatcagttggaaaaacactagatccttcaataagtggtaatggcacaactggaagccatctggaaaaaatatttttcttcataccttaatcctggaaccaatacaagctccaaatatatcaaaaatttaaatatttttaaatgaaaacataaaaacgttagaagaaaacatgaaagaaccttttttttttttttttttttttttttttttgagacggagtcttgctctgttgcccaggctggagtgcagtggtgcgatcttggctcactgcagcctccacctcccgggttcaagcaattctcctgtctcagcctcctgagtagccgggactataggcacctgccaccatgcctggctaatttttgtatttttttttagtagagacagggtttcaccttgttggtcaggctggtctcaaactcctgacctcaggtgatccacctgccttggcctcccaaagtgctgggattacaggcgtgagtcactgcgcctggctggaaccatttttataacctagaacaaagcttcttccaagcacatcacaaaacccggagatcataaaaggttaatgaagtaaactaaaaacatttctttttttgagatggagtctcactctattgcccaggctagagtgcagtggcacaaacttggctcactgcaacctctgcctccaagtttcaagtgattctcctgcttcagcctcccaagtagcttggattacaggcacccaccaccagcctggctaatttttatagttttagtagagatgggctttcaccatgttggccaggctggtctcgaactcccgaactcaactgatctgcctgccttggcctcccaaagtgctggtattataggcatgagccaccacggctggcccaaaacattttttaagtagtggaaaatactaagactttttttttttttgagaggagtctcgctaaacaaagggctaatttttttttgatatataaagagcttcttatggtcagtttttaaaagaccaacaaaccaatagatcaaaacacatggacaggtctcagaaaaggaaaatgagatggcttttagatattataaatgatgttcaacttcatttacaatcatagaaatacaaattagtttcacagagctacaatttttgatctgttagacttttgacaactatattgtcagaggtgtagggaaacacctttctacactggagagcgctttcttctgactcagcagttcagtcagaaatttatatacacagatatactcacatttaggcacattctatttattggacattgtaacacaagagtggaataaattaaatatccatgaataggggaccagttaaataaatatgagattttgatattaaacatttccaagacaaattgtttcattaaaaaagaaaatgcagcagggtactcatgattggtcccatttgtgctatctttctaaagatgtgtacttacgtctcttgaagggtatataagaatattaatagtggttgcctctggggtggagagttaagagattgcggaaaacgaagagagggacctttcactgtattccctttggtgcctttggaatgtggtaccatgtttttgtgctatctattcaaaaagtaattattttatagttgaaataaaaaaaaataagccaaccaaccaacaaacacccaagcttaggaacatttaaacgatgctgtatctgaaagcacattgtggggtcttggtagatcgttctcctcctggtgaccaagagagctacagtccacctgttattttaggtgagaaaactgaggctcagaaaatatacttcacatgtccaaatgctagtggcaacacaggacttttgacttccctcctggtacttttttctgtctctgctaaaagagaagagacataggcagccctgaaaacgtcactctggtgtatgtactcctccagtgtactgaaacatttacttttcaccagattgtgtctctgagacagtttagagctggacttttcaatgaatacttgccatctagtggtaaaaaaagatgtgtgcacctaacatagactgcattcattcattcattcatgcatcaaacaccatacagtcatgcactgcataacatttcagtcaacgacagactgcatccatgacagtggtcccttaagattataatggagctaaaaattcccattgcctagtattcactatactgtaatttctatcattattttagagggtactcctacttattttttttaagttagctataaaacagcctcaggcaagtccttcacaggtattccaaaggaaggcattgttatcctagaagctgaaagtgatgagttactgcccccgaggaccttccagtgggacaaggtgtggaagtagaagtcaatgatgttgatgatcctgaccctgtaaaggcttaagcacattttttaaaatgtgtgtgtttacatcttagcttttaacaaaaaagtttaaaaagttaaaaaaagaattaaaaaggcctgtagaataaggatataaagaatgaaaacattcttgtacaacatgcactgtgttgttgttttaagctaagtattattacagtcgttaaaaaggtaaaaaaaagtgtataaagtaaaaagttagaataagctaaggttaatttattattgaagaaaagtgtttttataaatttagtgtagcctaagtgtacagtgtttattaagtctacagtagtgtgcagtaatgtcctaggccttcacattcactcaccactcactgactgacacagagtaacttccagtcctgcaagctccatacaggtgtaccatttgttatcttttataccttattttaatggtaccttgatatgtttaaatatacaaatacttaccattgcattacaattgcctatggtattcagtacagccacatgctgtacaggtttatagcctaaaaacaataggctataccatatagcctaggtgtgtagtaggctagaccctccaagtttgtgtaagtaccctctatgatgtttgcacaatgaagaaattgcctaatgacacatttctcagagcatatccccgttgttaagtgaggcatgactgggaaatcacttgtccttaaggcactcctagtctcttgggaaagactgacagaaaaacaggtgattacaccagtatgatgaagagacaactgcactcccatgtttattgcggcattattcacaatagccaagatatggaatcaacataagtgtccatcaacaaatcaatgaataaagaaaaattggtgtatatacacaatagaatactatctagccataaaaaagaatgaaatgccatcatttgaggcaatgtagatgagcttggttgacattttgttaagtgataataagccaggcatggaaagataaatatcacatgctctcactcatatgtgggagctgaaaaagttgatctcataatagtggagtgtggaatagtggttactggagactgggagtcaggggatggtgagaggttagttaacggatgcaagattgcaactagatagaaggaataagttccaatgtcactggagcatgactgtaattaacaacaatctacagtatgttttcaaatatagctagaagagcagattttgaatgttctcaacgcaaagaaacaataaatgaggtgatatgcatgcaaattaccctttgattattttacattgtgtacatgtatcaaaatatcacactataccctgtaaatatgtacaaaactatgtgtcaactaaaaataataataaaagataaaagaatagaaaaatggggaacaaaaagacccatggtgagcgtgaaactaaaaaaatagaatagaaaatgtctcattaatgttttcgttatattgattacctgctgaaatggtaatcatttgtgaaaaagaaaaataggtgattccactacagtgcaactaaggctaggaaagtcaagtacaggacacagggagcacagtgtagggcttaaccttgccttgggaaattgcaggtatcaggagcaacactgaactcacttttctggattctcagtagatgctaaaattacctcctttcttgtcttcctcttgctggaccccatcaggaccaggatagcagtttttgttgttacgttctctgtgtctgaggatggactcattaactgatcatgttaggaaggcagccagtgtatgccctttggctacatggagtagctgttccaagagctgaatccgtgccaccgttgcatctggtctgcagatctgttttccaaagagccatatgcgaatgcattgttcatttcccacctctggtcagaacatctgtggaatgtccctcctgcccatgtagtttttcagctctgttatcctgaagctctttcaaaggttagcctttcattctccaagcaaacaagttcttgtagcccatagaagatgtcctccatagaaaccaaagcagtccacccagcttgcctagaatgaaaggtgcctaaagtggtagggggtggacctgcaaagaaaggtggagtcctttcataaatgaacttaaataccaggctggagagatgcagagattacaagtagacctaaagtaattaggaagccattgagggtttctgagcaaggaagcgaccagagaccaacgtatttgttcattcaacaaataattgtcaacatctactgtgtgcaaagctctgagtgagaccctgtgctacagaccccagcacagagatgaataagacccagggtgggagacatgtcatcctcctgggttataatgccttctacctccatgcaacagcttaaattttttgtctcagagaaggaaagaaatgtcagagcataagaaattagtgacagaaattataaactataaatcacagttctaattgttctataatcatgtaaacatagcaatttttctttaacatagaaatatacaaatcaaagataaaacaggagccccatctcatggagagatagtctgctgcctcttcagattctacctcaacattataacatgtccttttgacactgtggagccaataaggtttccatccctagaagacctttctctcccaatctgtatccatcagaattccactcaaccttccataccctccttgccagaatacctttccaactccttccaaatgcatgtcatttctgcctccttggatcttccagaccatattgtaaccccatttggcccagttcctgccttgtattatgggtgtctgctcctaaaaacaaaagtaggagtcagtctgagctggggtgtagtctggaatcacccctccatctccctagtcatgcttttcatatgtctcatagtacattgagaagtgtctgttgaattgagttgaatgctttagacctcggttcactgacagagggactcctttagcaaagttagccattttacctcctttgtctccatagctacttccagttctccaaactacaacctatttcccaacagactccagttacagtacttcttaatttatcttctattcaaaggcaaaactactgcttcattaatcaatgagtaaggaaaatcaaaagcttattaactagcaagccaatgctcttctaaagggcattgatccatgtatgttatgggcagcctgttcattgatagctacagctcttggagagcagctctctggagtagcattggggaaactgaaatcttattttgaaatagcttttaaatgcatggaaacacatctgattcttactgggaatttcttgatagggaatacagaagggaagactatttgcttgtcagtaatatgatatagagacaaatcatttcataggatttcataagtgcatatatgtaaccaagaaacacaggtactttcatattatcttgagaaaaatgaattcattctttaaaatgcaatgacttccctgcataatgcattcaagaatcaatgcaaatataaaggatgtgtttattggcttgtgatctgtattcatgactgcaagcatggttggatcttttgagatgggggtttcctctgtttcagtggccaagggatattctttctcaaatggacatggtgatcatttgaaacttatcccatgcatagtgaccccaaattcgagtaaatatatatcaagtacatataatacacaaagaagtgagtctgaagtcaacctccaagcactccaaattagggccctaagacaactgcagaatttgttgcagggcagatgtatggcctggtttagaactttattattttgacctccattcgcatgttagttttacttcttcttctatcttcaatcttttacaacatacatcctttacttattagattctaatatattagcatttaacatacttttactatttcttggacaatggaaaaaccttagaacactgtaattccctttagcccatgtattagtctgctctcacattgctataaagaactacctgagacttggtaacttataaagaaaataggtttaattggctcatggttccacaggctgtaaaggaaacatggctgtggagacctcaggaagcttgcaatcatggcagaaggtgaaggggaagccagcatgtcctataaggctggagcaggaggaagagagcagggagggccacacacttttaaacaaccaaatctctgagcactcactcactatcacaaggacagcaagaggaaagtccacccaatgattcaatcacctcccaccagaccccttctccaacactgaggattacaattcaacatgagattcatgtggggacacagagccaaaccatatcattctgcccctggccccttcgaaatctcatgtccttctcacatttcaaaacacagtcatgccttcccaacagtctcccaaagtcttaactcattccagattaattcaaatgcccaaatcccaagtctcatctgagacaaggcaagtccattctgcctatgagtgtgtaaaataaaaaaacaagttagctacttccaagatacaatgagggtaaaggcattgggtaaatgcttctgttccaaaagggataaattggcaaaaaataaaggggttacaggcgctatgcaagtttgaaacccaacagggcagtcattaaatctcaaagctccaaaataatctccttagactccatgtctcacatccaggccatactgatgcaaatgatgggctctcaaggccttgggcagctccacttctgtggctatgcagggtatagcccctgcagctgttttcacagactggcatcaagtgcctgcagcttttccaggcacatggtgcaagctgttggtagatctaccattctggggtctggagaatggtgaccctcttctcacagctccactaggcagtgccccagtaaggatactgtgtgggggctccaaccccacatttcccctctgcactgtcatagtagaggttctccatgagggctccatccctgcagcagacttctgccatgacatacaggtgtttccatacatcctctggaatatatgtcagcctcaacttttgccacctgcacactcacaggcttaacactgtgtggaagccttggtggcttccagcttgcaccctctggagctgtgacctgagacatatcttggccccgcttagccatggctggagctagagaggctaggatgcagggcatcatgtcccagggctgcacaaggcagtgggaccctgtgcctggcccacaaaaccatttttccctcttgggactctgggcctgtgatgggacaggctgctgtgaaggtttctgaaatgccttacaggcatttttcccattgtcttggctactaacatttggcttctctttacttaggcaaatttctgcagcaggcttgaattcttccccagaaaatgggtttttcttttctaccacatggccaggctgcaagttttccaaacttttatgctgtacttcccttttaagtataagttttagtgtcaggtcatttctttgtttatgcaggttagtgtaggcttttagaagcagccaggccacatcttggatgctttgctacttagaaatttctaaatttctaagataaaatttctaaattttagataccctaaatcatcactcttaagttcaaagttccacagatctctagagcagggacacaatgccgccagtctctttgctaaggcatagcaagagtgccctttactccagttcccagtaagttcctcatctccatctgagaccttagcctgggcttcactgtccatatcacttcagcttttggtcacaacaatttgacaagtctctggaaagttccaaactttccctcatcttcctatcttcttctaagccctccaaattgttccaacctctgcccattacccagttccaaagtcacttacacattttcaagtatctttgtcgcaatgccccactccaggtaccaattttctgtattagtccattctcacattgctataaagaactgtctgagactgggtaatttacaaagaaaagaggtttcattggctcacagttccacaggctatacaggaagcatggctgggaaggcctcaggaaatatacaatcatggcggcaggtgaaggggaaactgacatgtcctacatggctggagcaggaggaaggcaggggaggtgccacacacatctatttttttatttatttttattttattattattatactttaagttttagggtacatgtgcacaatgtgcagtttagttacatatgtatacatgtgccatgctggtgcgctgcacccactaactcgtcctctagcattaggtatatctcctaaagctatccctccccactccccctaccccacaacagtccccagagtgtgatgttccccttcctgtgtccatgtgttctcattgttcaattcccacctatgagtgagaatatgtggtgtttggttttttgttcttgcgatagtttactgagaataatgatttccaatttcatccatgtccctcaaaggacatgaactcatcattttttatggctgcatagtattccatggtgtatatgtgccacattttcttaatccagtctatcattgttggacatttgggttggttccaagtctttgctattgtgaatagtgccgcaataaacatacatgtgcatgtgtctttatagcagcatgatttatagtcctttgggtatatacccagtaatgggatggctaggccaaatggtatttctagatccctgaggaatcaccacactgacttccacaatggttgaactagtttacagtcccaccaacagtgtaaaagtgttcctatttctccacatcctctccagcacctgttgtttcctgactttttaatgattgccattctaactggtgtgagatagtatctcattgtggttttgatttgcatttctctgatggccgtgatggtgagcatttttttcatgtgttttttggctgcataaatgtcttcttttgagaagtgtctgttcatgtccttcgcccacttgttgatggggttgtttgtttttttcttgtaactttgtttgagttcattgtagattctggatattagccctttgtcagatgagtaggttgcaaaaattttctcccattctgtaggttgcctgttcactctgatggtagtttcttttgctctgcagaagctcttgagtttaattagatcccatttgtcaattttggcttttgttgccattgcttttggtgttttagacatgaagtccttgcccatgcctatctcctgaatggtattgcctaggttttcttctagggtttttatggttttaggtctaacatgtaagtctttaatccatcttgaagtaatttttgtctaaggtgtaaggaagggatccagtttcagctttctacatatggctagccagttttcccagcaccatttattaaatagggaatcctttccccattgcttgtttttgtcaggtttgtcaaagatcagatagttgtagatatgcggcattatttctgagggctctgttctgttccactgatgccacacacttttaaacaaccaaatctctgagcactcactcactattacaagaacagcaaggggaagtctgcccccatgattcaatcacctctgaccagaccccttctccaacattgaagattacaattcaacatgagatttggtcgaggacggagagccaaactatatcaatccactaccatcttaagtattattgttaccaaataattaaatttcatatatattttaaccctacaacacattattagtattgctttgcccagtcaaaattcatttggctttacccatatatttattctttctgttgttcttcctttttttatgtccattttccttctgggatgatttccttctacctgaaaaactccttcagcattttttagaatttgcaggcaaagaattctcagttcttatttatctgaaaatgtctttattttgtctttatttttgaagagtatttttaaataagttgccacttattttcattcagtatttttaaggcatcacttgtctgtctgtggctttcatgatttctgttgagaagtcatctgtcagtcttatggttgcttgttagaaaataacatgtctttttacatagctgcttttaagattttgtctttatctctgattgtcagtagttttactacataggtaggcatgactttatttatatttattgtttttgagatttctagcacttcatgcatccatgtcttggtatcttttgtcagttttggaaaattctggcccttatttcttcaaacattggttctatcccaatattctttctcctttccttctggaactttaattatatatatgttcaactttatcatcattttccatatgcttcttatgctttttttgtatattatttatcattttccctccatactttagcgtggatatttcctagtcctctcctctgctagtctgaaatgctattaaacttgttcttaattctagttatatttattaatattagttctagaattttcatttgattcttttttttagaaattccagtttgttgctaaaattctccatctagatttctatttccttgaacatattaattatagtttttaagtccaagtctggtaactataatatctagatcatttgtaggtctatttctattatttgtttttcccttgcttcagtttcttggtatgtctcatcattttctattgaatgccagacatgtgtatgataaattataggggctctggatgacattatcttccttcacaaagatttgcttcttctagcaggcagttggagtatggaaaatcacctaatcaggccttgggttgggttgtttttaagctggattctgtctttgtgagggctcttttacttatggttcactcttattccatgggtgtagctcttcagggttcctcacttaaagcctgtagtgcttaccagtgtgtctcttccttatggtttccaatttccaattttaatcttccccaaatctgaggctgctaaaagctctgtttaatctcttagccactaatttctacccagagttgcaaacttccttcaccatgactcttacaaattagcaactgcctcagaagaaacagcagtgccaaacatcaggctcacttctctgtccctttctcttcagggacttgatcttagctcaagtcattttctctccccagtcttatgagactgatgaaagctgtactcagcttctcagcctcttagccttgtgtggctgatgaaaaagccagagcctgaagggaaaaaagcagtttggaatatctgactcacctccatgcatttcccttctctccaggatcttggccttcaagtcctggctgcattgagacctttccaatactttaaaccaagttactttgttttgttttattcattttttgtagttgttcttgggagattgttggcctcatataagctcgcttatcagtgttgcaggtgaaactagtatctcttctttaagtacttgggttctgtctctcctacatgcaagtctttctcttgcatctttctgatttgtgtctctaacccaatctcacttgctggtatcagttctaatatgctaggtgtggagaactgtacgtctgtctgcaattgttcaaatctttcctcttaagtaatatctcttactttgtttctattcttaatttatattgggaaatataatattacatcaagtgtgacttccttcaatgtgagtgccttggtaaaactctgcaactcttaggactgaagaaaaaaacctctatggatttaacataattaattacttatagtaattagtaagactctaattgattattacctctaagatgtcatgaattgatgccacttttttctgttttttgagttattagatgtgaaacagtcattattaaaaatttttttgatgcctttggaaagaaattacgggaaaggtgctcaacatcatgatcatcagagaaatgcaaatcaaaactgcaatgagctattatctcaccccagttaaaatggcttatatctaaaagacaggcaataaaaaatactgttgaggatgtggagaaaagggaaccctcatacactgttggtgggaatgcaaattagtacaagaactatggagaataatagtttggaggttccttaaaaaactgaaaatagggatactatatgattcagcaatcccactgctgggtatagatccaaaagaaaggaaatcagtatatcaaagagatatctgcactcccatatttgttgcagcactgttcacaatagccgcaatttggaaatgaccaaagtgtccatcaacagatgaatggataaagaaaatgtgatatatatacacaatggagtactattcagccataagaagaatgagatccagtcatctgcgacaacatggatggaactggatatcattatgttaagtgaaataagtcaggcacagaaagacaaacatcacatgttctcacttatttatgagatctaaaaatcaaaacaattgaactcctggacttagagattagaaggataatttccagaggctgggaagggtagtggggggtgggaggtgggggggatggggatggttaaccggtacaaaaacatagtgagaacgaatgagtacaacctatttgatagcataataggtgaatatagtcaataataacttaattgtacatttttaaataacttaaagagtataattggattgtttgtaactcaaaggataaatgcttgagggaatggatactccaatccccataatgtgcttattacacattgcatggatgacccaaatcatctcatgtacctcataaatatatacacccacaaaatttttttaaattttttttaaaaagaaaagaactatagatactccttgacttacagtgaggttacatcctgataaactcaggatgttttatcagttacaactgaaaaaagttgaaaatatcactaagtcaaaaatacacttaatatacctaagctactgaacattatagctcagcctaacctaccatatatgtgctcagaacacttacattatttttatatatatatttatatatatatatttatatatatatatttatatatatatttatatatatatttatatatatatatttatatatatatttatatatatatatttacatatatatatttatatatatatttacatatatatatttatatatatatttatatatatatttatatatatatttatatatatatttacatatatatatttatatatatttatatatatttatatatatatttatatatatttacatatatttatatatttatatatatatttacatatatttatatatatatttatatatttatatatatttatatatatttatatatttatatatatttaatttatatatatttatatatatttatatatttatatatatttttatatatatttatatatttttatatatatttttatatatattttatatatatttatatatttatatatttatatatatttatatatttttatatttttatatatttatatatatttatatatttatatatatatttatatatttatatatttatatatatatttatatatttatatatatttatatatatttttatatatttatatatatttttatatatttatatatttatatatctatatatatttatatatatctatatatttatatatatttatatatatctataatttttatatatttatatatatctatatattttatatatatctatatatctatatattttatatatatctatatatctatatattttatatatatctatatatctatatatttatatatctatatatatttatatatttatatatatctatatatatttatatatttatatatctatatatttatatatttatatatctgtatatctatatatatttatatatttatatatatatttttttatatctatatatttatatatatataagatggagtcttgctctgtcactcaggctggagtgcagtggtgcaatcttggctcactgcaaactccacctcccaggttcaagtgattctcttgccttagcctcccaagtagctgggactacaggtgcacaccatcacacccagataatttttatatttttagtagagacgggctttccgcgtgttgtccaggctggtctcaaactcctgacctcaggtgatccacccacctcggcctcccagtgtgccgggattacaggcatgagccactgcatccagctagagcacttacattaacccaaagttgggcaaaattatcaaacacaaagcctattttgaaataactgttgaatatctcatatagtttattgaatactatattgaaagtaaaaaatagagtggttgtatgtgtactcgaagtacagtttccactgaatgggtattgcttttataccatcataaagtcaaaaattataagttgaaccatcataagatggggactatctgtatattaaaataatgaaggttttccacaccaggtgtggtggctcatgcctgtaatcccagcactttgggaggccaaggtggggcagatcacttgaggtcaggagttcgagaccagcctggctaacatggcaaaaccccatctctactaaaaatatacaaaaaaaatggctgggcatggtggcaagcgcctgtaatcccagctactcgggaggctgaggcatgagaatcacttgaacccgggaggcagaggttgcagcgagctgagatagtgccactgcacactagcctggtcagaaaagcaagactctgtctcaaaaaaaaaaaaaaaagacaaaataatgaaggttttcttaaaatataaaatgaaatatgaacactaacccatgtatattacacatatatgtagagagaggggggaaacactaaccaatgtatatataggaatgtctagtttggtagatgccctccattccaattcaaatgagagcagaagttgattactataacctaaagaagaatgtgttaaagcagggaatttaaaaattaatacatggatatgtcaaatagtttaacttaaatcagataagtgtaccttcaatcagaaatataaatcatgccaataatttatcacccctgatttccagtttaggcttcttgaaaatgaatctgtacttaaagatacttgcagaaccatctgagtatagaactcctgagttttacaacttttcccaatcttttacagatatcttgctctcacctaattatacattattttcagcaacttgcctctgttgagtcctttcagagcagtcataaaaaatgccttccttttctcactcatatctcatcaatttcaaaagattttaccaaattatgtaagcacaatgtcagaataactggtataaggaggtttgagaacaaacacaacttactcttggtaaacatgcaagtttactgcagaagcagaagcgtgctgccacagcggagagtgggcacccagctgaatcatccggatgccctagctctgtcagtgtttataatactacagagggaatggcaagcatcggctggtcctgcaaagaggttaagtgttggctagtcaagagagcttctgcaatacagttattttgagtatagttattttgcttaatcttgggttgaatctacatctttttgaagtcaccttccttgtcaccactcatcttatcctcacattcactggcatgatttcagaatgattggagatagcttcttccaatctaaatatcacagattgcctaagtttaataataacagtgcactttttgtgtgttaacaaataccagacttctaaacactttacatgaatgtcattgaatctttagaaccctaagaagtagggctattattatccacattttgtacttgaggaaatggaggctcaaaggaatgaaatggcttgcacataggctcatagaaagtaatgataagtgcaaaattcaagtccaggtcatgagcatctacaacttacatgtgtaccacacactaagtgcatcccttgtcatagaacttgggggctggtggtgggctcccgcctgtcaggctggggccagctccccaccctgccattctccttttatttctccagtcagcctccctaaactcagcccactttgccttctttcaggaagtgattacttcttatagccccccagattctccccccatacctggcaaagggctgggttcaggcatcctccattccctctttcactgactctgaggatatttgtttgagctccttgtgatttcagaattttactgtcatcactatggagacatggggtgagagaaatacacatgcagaaaaatgacaaaggcttcagaaacttactacattcttggattctggttcctgagctaccattcttcatgcccgtgctgtggtgggaaccaaatgctcccatggactgctgtcctccatattgattcctgagagaaaggctctccaattccctcccccgctttagcaacagccctggttacccccacacccataaaggctactttgcccagcacagttgtccccttgtttatagtggagacttgtgctctaaagcccttcaaactgggaagcattcaattctggcccccacatacagcagcagtaatgacccctctgggcattacctgatggtcactatttagaactaagtatcatgacttctggaaaaactgttaaaatgccaagtatttttgcctggcacaaatcaggttgagtggccaaggcaaaagagccacagcttcagccaccgttaaccgttaaaggtgaaaagaaattcgtttatccacatagcctatatccaagatggttttactggctgtgctgaaatggcagaaactcacgggaagtccatggataaatttaaatttccactatccagtgcatctaacatgtatcccagtatcaatcctcccactccttttaatatcaggataccagttgtcagctggatacatggccacccagaataatacatttcccagcttctcttgagatagccatagttatgaaactaagttctgaccaataaggtgtaagaaaaataatgtgtgcaatttcctgaaagagtacttaaccagagggagcatgcccctctttgtcttctggactgtccacctacaaacttttttacataagacaaaaataaacccgttctaagctacgatatttgaggtttctcagttatatgcagtcaaacctaatcctaactgggttaaccacccaagaagttcatcttgcccactgcctagatagccgattcatcacgacaggggcattgcaatagagaaagagtaatttatgcagagttggccatgcaggagaccggagttttattatcacttaaatcagcctcccctagcagtcagggagcagagattttaaggataacttggtgggtggggggaagctagtgagccaggagtgctgattggtcagagatgaaatcacaggaagtcagagctgtcttcttgtgctgagtcagttcctgggtgggggccacaagatcaatgagccagtttattgatctgggtggggccagctggtccatcaagtgcatggtctgcaaaatatctcaagcactgatcttaagagcagtttagggagggtcagaaacttgtagcctccagctgcatgactcctaaaccataatttctaatcttgtggctaatgttagtcctacaaaggcaatctagtccccaggcaagaaggagacctgctttgacaaagggctgttaccatcttcctttaaactataaactaagtttctcccaaagttagttcagcctacacccaggaatgaacaaggacagcttggaggttagaagcaagatggagttagttaagttagatctgtttcactgtctcaatatgattttgcaaaggtgatttcaatccctccttttgggtttttataacaccttgatcttaaggtgtaggctatgaggatgggaaaaggccgtcgatcactctggcttctttctgctgacaggagatgtagtgggaatgggagtgacccccaaggtgagaagagtagaaccactttgcaattgtctgagtgtactcatgcaggcctggctgggttttcaaggcttgcatggcaaaaaacattagtactctcatctatagttttactacagtgtttaaagtgaccagcctactataaggtaaataacgagtccgaggatgaggagtacaattcccaattttaaaagcaaagatctgaaagcattagtttggggacttctaacccacaaagaatttagaatttagtctaaactgcagaaaaaacctcaagaacagctaacaacagtgtactatagcttttcttttgaagcataatttttctgtctccagtccccatttttattcaaaacaaatcatgatagaactgacttgtttacaaaataaactttactcttactgtacttggcctgattattggcaaaaagtgcagcaagaataattatttttcacttaggctttttaaactggctttgatagaactctgctctatgaagactctcagataagactttttaaaaggtgagcccaggcatgggtttgtatcctcaaatacctatgagttgggcaaattcctcttctcttaaggtcccaagataacttggggttcctgggcctgttagaaagtggcattctttaactttccacaggtcaggaacctggtacagggactctgtgtacacaaggtatgaggccagattccccaatggactttaattggctctataagtcaactttgattctttaaaagaagcatgccattccagtcaaagccttggtaaaataaccagtttatccaattgtgtcctgttacaaaaggaaagagattcttactgtgcttatacaattaactatactataatgccataaattgagaatattcacaaatagtttccgaattctggagaaatcaggtagaaaagaacaaatatgatccaaattttgttcacaagagtatattttactcacttgttaaaagttgcaaatagctctaaagaaattagtcctcttgtctctgaaaacaaaaggtttagcaatgtttaacacattagctctccatgagagtcctagaagtttggctttttcatgtactccaatagcacaatttttaaagttatctgagtcctgcacttaagagtcctatatctgatcataaactgccttttgaaaaggaccaaaacaagacaaaatgtctgtggatgacaaaagtctatagccactattaaagctacaattgactaggaatttgggttacttctgtggcataaaacaattttatataacaattacaattaataatgtacactaaattatactaacattatagaagtttcccataattttggaacacatactcataacatttatacaaacacagtccaaagtaaaccaaacagcatttactcttctatttgaaactttttcttctaatctcacaatctccagcattattcatcagaatcctgcatttaagagcaccttaaatagctcattataaaaccatcttttaaagaggaccgaaacaagacaaatgtctgtagatgacaaaaatattttagggcagccacagttaaagacacaattgacaaggaaatttttacctccatggcacacagtctgttaccaaaataattataatactgataacatatattaagtcatattacaattataggagttttacataattttggaacatataccaataacacatttacataaatatagaccaaagaaagccaaacaccatttcatatttgatgatgcttcctgtataatttttgtaccaaataagccaaatgtcattactggactttagaggacctaacatctaaaatattaggctagaaagagacataatttataatttttttttggaaagttgtcagatatcaaaggtttaaaacactggatatcacaaaatagaatcacaggtcatcataagtcattcatttggccaaaatgataactccaaaatcttaaaagaaaaatctttactcagataggaaacttagccaataaagatagcatgaggccagctgaatttgtctcttctctctcctcccctttttttccctgccatttacccaaaggagaaaacaaaaccattttcattatcttttaacattacttaaaaatcgtcttcaaaaaaggaaaccaaatttcatgtttgcattacagcatctttaatgttaaagctagttatttaaataaaattttatatttctatccagttttaattaatttggccataaggtaagattttcattaactttttagaacactttacaattttccatcaaatagcagattaattttctaagaaaaccctgttacttggacacatgggcccagattctggtcccacatcagtatgattttaatgtgttaacctgtggaaaaaacctaaataatttctcttaaatcttagccaccttgtttatacccacagaattttttcataaaattaaccaaacccttttcactttgcttaagacttcagttttgtcccattactcttttaggttaagacaatctataaaatcctctgaactggacaaaattacattctctttaacaaaatccatattcctatgccttcttataatcttttaccaaaaacaccttccctatacaccttgtacgtaaaactgtttctccagtggtctcaactacatattatactgttaactcttactccttttagcatagctagtaggcatggctctccatatgttcccaggccttatttataacctaatgctccaaagtaggtaaattgaacaattttcaaaagtcaaacagtttgaccttaaagcatttagcaaatctgatatctgaccttaatttagaccaaatgtctacattttcaagacattttattttaccaataatccttaaaactgtctttatttccaaaagattactaaagtcacgtgaacaaaaaggcattaaagcttcttttttctgacaaaatgtttgatttaagtgctttttctaagccaattaatcagagctcttttatagataaacatacaacacatacaaaaatgcagacagaagattcaatgcttgtaaaatttttctttttttttcttttatttttattatactttaagttttagggtacatgtgcacaacgtgcaggtttgttacctatgtatacatgagccatgttggtgtgctgcacccattaactcgtcatttagcattaggtatatctcctaatgctatccctcccccgcccccaccccacaacaggccccggtgtgtgatgttccccttcctgtgtccatgtgttctcattgttcaattcccacctatgagtgagaacatgtggtgtttggttttttgtccttgcaatagtttgctgagaatgatggtttccagcttcatccacgtccctacgaaggacatgaactcatccttttttatggctgcatagtattccatggtgtatatatgccacattttcttaatccagtctatcattgttgaacatttgggttggttccaagtcattgctatcgttaacagtgccacaaaaaacatatgtgtgcatgtgtctttatagcagcatgatttataatcctttgggtatatacccagtaatgggatggctgggtcaaatggtatttctagttctagatccctgaggaatcaccacactgacttccacaacggttgaactagtttacattctcaccaatagtgtgaaagtgttcctatttctccacgtcctctccagcacctgttgtttcctgactttttaatgattgccattctaactggtgtgagatggtatctcattgtggttttgatttgcatttctctgatggccagtcatgataagcattttttcatgtgttttttgactgcataaatgtcttcttttgagaagtgtctgttcatatccttcacccactttttgatggggttttttttttcttgtaaatttgtttgagttcattgtagattctggatattagccctttgtcagatgagtaggttgcaaaaattttctcccattctgtaggttgcctgttcactctgatggtagtttcttttgctctgcagaagctcttgagtttaattagatcccatttgtcaattttggcttttgttgccattgcttttggtgttttagacatgaagtccttgcccatgcctatctcctgaatggtattgcctaggttttcttctagggtttttatggttttaggtctaacatgtaagtctttaatccatcttgaattaatttttgtctaaggtgtaaggagatccagtttcagctttctacatatggctagccacttttcccagcacaatttattaaacagggaatcctttccccattgcttgtttttgtcaggtttgtcaaagatcagatagttgtagatatgtggcattatttctgagggctctgttctgttccattggtctatatctctgttttggtaccagtaccatgctgttttggttactgtagtcttgtagtatagcttgaagtcaggtagtgtgatgcctccagctttgttcttttggcttaggattgacttggcaatgtgagctcttttttggttccgtatgaactttaaagtagttttttccaattctgtgaagaaagtcattggtagcttgatggggatggcattgaatctataaataacttgggcagtatggccattttcatgatatttattcttcctacccatgagcatggaatattcttccatttgtttgtatcctcttttattacattgagcagtggtttgtagttctccttgaagaggtccttcacatcccttgtaagttggattcctaggtattttcttctctttgaagcaattgtgaatgggagttcactcatgatttggctctctgtttgtctgttaatggtgtataagaatgcttgtgatttttgcacattgattttgtatcctgagactttgctgaagttgcttatcagcttcaggagattttgggctgagaaggtggggttttctagatatataatcatgtcatctgcaaacagggacaatttgacttcctcttttcctaattgaatgccttttatttccttctcctgcctgattgccctggccagagcttccaacactatgttgaataggagtggtgagatagggcatccctgtcttgtgccagttttcaaagggaatgcttccagtttttgtccattcagtatgatattggctgtgggtttgtcatagatagcgcttattattgtgaggtacgtcccatcaatacctaatttattgagagtttttagcatgaagttgttgaattttgtcaaaggccttttctgcatctattgagataatcatgtggcttttgtctttggttctgtttatatgccagattacgtttattgattttcgtatgttgaatcagccttgcatcccagggatgaagcccacttgatcatggtggataagctttttgatgtgctgctggattcggtttgccagtattttattgaggatttttgcatcaatgttcatcaaggatattggtctaaaattctctttttttgttgtgtctctgccagactttggtgtcaggatgacgctggcctcataaaatgagttagggaggattccctctttttctattgattggaatagtttcagaaggaatggtaccagctcctccttgtacctctggtagaattcagctgtgaatctatctggtcctggactttttttggttggtaagctattaattattgcctcaatttcagagcctgttattggtctattcagggattcaacttcttcctggtttagtcttgggagagtgtatgtgtccaggaatttatccatttcttctagattttctagtttatttgcgtagaggtgtttatagtattctctgatggtagtttgtatttctgtgggattggtactgatatcccctttgtcattttttattgcatctatttgattgttctctcttttctttattagtcttgctagcagtctatcgattttgttgatcttttcaaaaaaccacctcctggattcatggattttttgaagggttttttatgtctctatttccttcagttctgctctgattttagttatttcttgccttctgctagcttttgaatgtgtttgctcttgcttctctagttcttttaattgtgatgttagagtgtcaattttagatctttcctgctttctcctgtgggcatttagtgctataaatttccctctacacactgctttgaatgtgtcccagagattctggtatgttgtgtctttgttctcgttggtttcaaagaacatctttatttctgccttcatttcgttatgtacccagtagtcattcaggagcaggttgttcagtttccatgtagttgagcggttttgagtgagtttcttaatcctgagttctagttggattgcactgtggtctgagagacagtttgttataatttctgttcttttacatttgctgaggagtgttttacttccaactatgtggtcaattttggaataagtgtggtgtggtgctgaaaagaatgtatatcctgttgatttggggtggagagttctgtagatgtctattaggtccacttggtgcagagctgagttcaattcctggatatccttgttaactttctgtctcgttgatctgtctaatgttgacagtggagtgttaaagtctcccattattattgtgtgggagtctaagtctctttgtaggtcactaaggacttgctttatgaatctgagtgctcctgtattgggtgcatatatatttaggagagttagctcttcttgttgaattgatccctttactattatgtaatggctttctttgtctcttttgatctttgttggtttaaagtctgttttatccgatactagggttgcaacccctgcctttttttgttttccatttgcttggtagatcttcctccatccctttattttgagcctatgtgtgtctctgcatgtgagatgggtttcctgaatacagcacactgatgggtcttgactctttatccaatttgccagtctgtgtcttttaattggagcatttagcccatttacatttaaggttaatattgttatgtgtgaatttgatcctgtcattatgatgttagctggttattttgctcatttgttgatgcagtttcttcctagcctcgatggtctttacaatttggcatatttttgcagtggctggtaccagttgttcctttccatgtttagtgcttccttcaggagctcttttagggcaggcctggtggtgacaaaatctctcagcatttgcttgtctgtaaagtattttatttctccttcacttatgaagcttagtttggctggttatgaaattctgggttgaaaattcttttctttaagaatgttgaatattggcccccactctcttctggcttgtagagtttctgccaagagatcagctgttagtctgatgggcttccgtttgtgggtaacctgacctttctctctggctgcccttaacattttttccttcatttcaactttggtgaatctgacaattatgtgtcttggagttgctcttctcgaggagcatctttgtggcgttctctgtatttcctgaatttgaatgttggcctgcctcgctagattggggaagttctcctggataatatcctgcagagtgttttccaacttggttccattctccccgtcactttcaggtacaccaatcagatgtagatttggtcttttcacacagtcccatatttcttggagggtttgttcgtttctttttattcttttttctctaaacttctcttctcacttcatttcattcatttcgtcttccatcgctgataccctttcttccagttgattgcattggctactgaggcttgtgcattcgtcacgtagttctagtgccatggttttcagctccatcaggtcctttaaggacttctctccattggttattctagttagccattcatctaattttttttcaaggtttttaattgctttgccattggttcgaacttcctcctttagctcggagtagttggatcttctgaagccttcttctctcaactcgtcaacatcattctctgtccagctttgttccgttgctgatgaggagctgcgttcctttggaggagaaggggtgctctgatttttagagtttccggtttttctgctctgtttttcccccatctttgtggttttatctaccttttgtctttgatgatggtgacgtacagatgggtttttggtgcagatgtcctttctgttttagttttccttctaacagtcaggaccctcagctgcaggtctgttggagtttgctggaggtccactccagaccctgtttacctgggtgtcagcagtggtggctgcagaacagcggatattggtgaaccgcaaacgtttctgcctgatcgttcttctagaagttttgtctcagaggagcacctggccgtgtgaggtgtcagttcaccccgtaggggatgcctcccagttaggctactcgggtgtcagggacccacttgaggaggcagtctgcccagtgcttgtaaaatttttcaattgccagtttcttaattggattactggcttcagggtggagcccttggaggaacagggccaggaaagcatgcatttctagggccaaataagcagctgaaggcaaagacagttccccaaaattaagggtgccattttatactggatcctggatccccaaaaggagggaaagactatgggagaagatagtgcaatgcttctaccctgcatttcagcatttcattgcaaggcaacccaaagccaatcagcccattttgtaatcaccccatctctcatgagggagtctcatctcccatttggggatgaggatgtttccttgtcttccaggtggccacgagcctgcttctctgatccaagtgtgctaagagtcaagtatccctccctaactactgttagccatcccttaaagtgtatttcctacctagttataatgtgaagtaatttgatacccccaaaactcaaaaccttcagataacacaatgcaaaacagaacacagcctttgattttgagagggatttatctgcttttaattccttgggtttcatgaggaaaacagaggggttttttttttccccaaaatggggcctgtggcacctcctctgttttcccaatgagtccgaggctaccggaagttatcttagggcctctcctgtgtgcattaagtgtggcaagacaaaaaaaagaaaaaaaagaaaaaaaaggagaaaaataattcagtcaattgagaagaaaaaacctttttccagaaaaacaagttccaagaagagaaaaacataaaggccttttaaatatatctgtagcttgtttatccacttttaattaagctgatttttaatcatagtgctctctaaaaaagaaatcctttcaaatctcttattacctgactttatccatgccaagtggccaatatttctagcttctaaactttatgaaaggtaacctcctaggtgcttcaaaggcatggtaagcagtttctttttttataggagttagaagctctacaagatagttcagagaaaggaaaattaaagagaggaaatcagaagataaccatgggtggggggagggggagactcaataaatggcaaagttacacaaataacaaaccagaaaggaatcattccagaagccaacaattgaacctaggccaccactgtcagaagataaagccttagctactgagctgtacagcattgagcagtttctattgcttttcccagaaggagcctagagaagccagtttcaagctttcaaggctttaactgctcacaaaaaatttttaggactaactatgacaagaacccccaaattcctgtcctctggatggtggaaatcaaaagaaagtattcccacatggtcactaagttaagctgttaaggacacaaaacaagacagagaaatttcctacagtattggtttcagggacccatagcaaagtttgtaactgaccagcctgccaggctggcttgaaaagcagggttataggggtcctaaacccacatgctatcctgtgatacccctgtctccattacagaacacagaaagacaaattcttattacaaagtacaccagatttgctacagcctaagactagtctcacaaatccttttttctattaatcaaacccttgcagaggacaccagtagtttactgttttactcaaacagagaaagagagagcaagcagaaacttggctggtaagaatttcttaccctttttgctggcataccaggtttctaggttccctttctctgcagtttccagaagaaccgagtggcttctggcgaccctgctcacttgtgctatagctggggattcaagccactttacaagagaaaattaccctttactgtcttacagaaccataggcaaggttcttaatttgcaagatgctgcccaatgggctgcatgggaaactgaattaacattttccgttccagcaaaacacacataacaaaacagacattacttaccttgttcagcacccactatcagcctggcaaagctcaaactttttcccattggtccctgtcatctttgatctactctatgtggggacagatgacctctgaagggtaattcatattggggtctctgggaaaggcaaagagcagacaggcactccgagacaggcctgttaagccctctttagggttcattgaatgtgaccagacgaataaggagggttctctgagttaggcctgctggacttccatcagcaacccctctgagatcccttccacatatgcaaacacacacaaagatgagacagacagaaggccttccaaatcagatccctaaccaagagctccaagaatatcccttattccaaactatcctcctattctccgtctgagaaaccgcctcaaaatctttctgattgagaagtctccaaagccaggactcttcctactagttagaaagagccaactgagacccccaggagccgaacagacaccctgcaatgaggctacaggtatcccatggtagagctacaaagagacaccccacaatggagctacagacaccccatcatagggctacagacaccccaccatagggctacagaaccagtcgggagaaggaaggtggccttggcagcaatactcaccaatccagacacccctcaatggggctacagacagatatcctgtgatggggtacagttaagggacatctcaggactatttctccattgcaattaaatccatgcacattgggtcggcagtgccccaccagtagagagagtaccagagtcagtccccagcccaagagaactaggcgactgcttgggttggcttctggatccatccataaaaggggtgccaccgaaccacaggcatgtagccacaagggcaatcccagacaagcccttaaatttgtaaccacccgaggggttcgccttgcccgctgcctagacagagccgattattcaagacagggaaattgcaacagagaaagagaaattcatgcagatcctgctgcacaggagactggagttttattattactcaaatcagtctccctgagcatctggggagcagagttttttgttgttgtttgtttgtttgttttgagatggtgtctcgctctgtcacccaggctggagtgcagtggcgccatctcagctcactgcaagctccgcttcccaggttcacgccattctcctgcctcagcctcccgagtagctgggactacaggcgcccaccaccatacgcagctaattttttgtatttttagtagagacggggtttcaccttgttagccaggatggtctcgatctcctgacctcgtgatctgcttgccttggcctcccaaagtgctgggattacggtcatgaaccactgcaaccagcccagagtttttaaggatagcttggtgggtagagggaaaccagtgagccaggagtgctgattggtcagagatgaaatcacaggaagtcagagctgtcttcttgtgctgagtcagttcctgggtgggggccacaagatcaatgagccagtttattgatctgggtggggccagctggtccatcaagtgcagggtctgcaaaatatctcaagcactgatcttaagagcagtttagggagggtcagaaacttgtagcctccagctgtatgactcctaaaccataatttctaatcttgtggctaatgttagttctacaaaggcaatctagtccctggccgtccccataggtgaccaaccatgctagtccttctctagcaagaaggaggtctgctttgggaaagggctgttatcgtctttgtttaaactatagactataagctaagtttctcccaaagttagttcagcctacacccaggaatgaacaaggacagcctgaaggttagaagcaagatggagtcagttaagttagatctgtttcactgtctcagtcataattttgcaaaggcgatttccctgacacatgtaagaattccaaaagtatttcagagattgaaagacttgtttcttattcctgttcaaagtacttgtcacatgaaatacattaaatccaagattctctgattctctcactgttgtaaaacacacacacaaacacacacacacacacacacacacacacacgctttggtctccagtgactggggaggagtcgtttgctctcacagattattgtattctacacacaattcttcaattaaatgaatgtttagaagtcacaaacactttgggaggctgaggcgggtggatcacaaggtcaggagatcaagaccatcctggctaacatggtgaaaccccatctctactaaaaatacaaaaaattagccaggcatggtggcgggcgcctgtagtcccagctactcgggagactgaggcaggagaatggcgtgaacacaggaggcagagcttgcagtgagccgagattgcaccactgcactccagcctggggaacaaagcgagactccgtctcaaaaaaaaaaaaaaaaggaagtcacaaacaacacagaatcctgcacaaacttggtctcagttttcaaccaatccctaccctcactcgcgagatgagaaaacaaaagaaatcagcctgcctttttttattccttgggctaaattgttacatactctgcaaggaaatgagcatagatatttccaagactaaaccatcatacccaagcagtcagtaataaatatgatgaatgcctaaataaattatggctagagttggtaaagtaattcttcaccatcagatgattcctgtaaaaagcactaaagtgtcaatctacatgaagcccccggccctgtttcaagttatctgttaattacacatccctcatttatccagtgactctgctattatggtaagtgtcggattcattttatcccattgctcaatagattttaattgcagctgctgcagcagacaccttgagatacatttcctattgagaccgtggcagcctgctagactggcccaatgatgattaatttcaatgacttgaatcactgagaagaagggaagccacttccattttaattacatctacaagagtgcagcacttttataccagttcattgtccttaaacaaaagaatacctgaaaggaaaacaaaattcagggtatggtggtctctatttgtactgatctccttttttcagttcattgcaccacaactcagtcagctctgtattgggaaatattggcaagccattgggatttgcacacagattagaaaccatgaagaaagcgtcattcagcttgtttttgtttatcttacttgggcaattagaatccattgagcgggttaagatatgacacagcattttgccatcatcgcagatgttccacataaaagggtcaagaataattaactctgacatgcatatgtatttatttattgttccagggagacagagccaaagacattcttgggattttacagaacactccatactcattcatacccttggatgctggcacatgctagtcccttctcttccccatccatttggataaaattttccagcaaaggccagctcaattgtcatttcctctgtcctgccttgagataggggtggagtgagggtgggggttgaaagagcagaggccttggatgagacatatctgactgggactgccagtgctgtgtgaccttgagcaagttacttaggctctctgagccacagtttcctcatctaaatgaagaaaaattaacattctcctatgttattatcatgtggattaaatgagatactttctagaaagcacccagattgatgcctggtcataaaagggtgtgatgggtataagtctactttcctcttctgcacttctcgcagtagcacttaaaaaaaaaaatctcctttatgatgctaattgatcagcaagccagaaaacaggaatttaggctctgtcctttcctccttcccctccccgcgtaaaaagatgatgaaatgtatttgtctctacttcctatttcagattcattctcttctcttcgtcctcactgctaactaccttgattcacacctggtttcttcatccctcacctgaattaatgcagaagactctttacagatccccacacctcccatctgacccttctattgcatcttccatgaggcttgcacagtgatcttccctgcccctccccataggtgaccaaccatcccagtttgtccaggacagcaggggttcccaggatgtgagacttttcagttttaaaatcaggacattcccaggcaaaccaagatgagttagtcaccctgcatcccttagttaaaatctctcaacagtttctcaaagattccaagataaacttaaatttgtcagtgtaatacacaaaactgtttgtaatctagcccttcctctctaccttcatcttcatcatgcctccgtatttcctgcacaaacacacacaccctttgctttggcaatactgggctcctagaacttcctccgcagatatttcatgctctttcttgactccttctttgtctttgcccttgcagttccttccacttgcaatgcccattcccctactcctttcatcggctagctccttcagatcctgatgcatcatctccactaataagtcacccctgagagtctaacgtagaagctcctctactgtgacttctatcgcaccctgttttaaactctgacctgacatatcttatgcttcactgtgattatgatctgcctgccctaatagactgggcagttcctgaggacagggactatgccttctttaagtcagggagttgacgcatgtctgtgctcattattggctggacgaacaaataagttgtatatatttgccttctcacctccactactaagtgacctcctcaaaggcagaaaggacacatcttgattttctttgatctcttgattttctcccccagcacctggtccacagcagggcttaattaaatgttttgaatatatgaatgaatgaataaatacatctttctttagatatgagcctagctttcctggtgaaataaacttcccttcagtttgttcactaccccctgccccagctggctgtgtgccctagacaaggaactagttgtcagaactaaacatggccccacactgtccctcaagtggccatcagcccgaagacactggggtcaggacctctcctataggcatgaactccagaaggaaaaagatttctgtccaaaggctgatttcagtcaaatctaataaaattttcaactagattccttacacaattaaatataaagaccactagcatatggggaggaaagctacaccagatggctttcccactacaaagagatgaaatatatgtcatttccacttccatagtggtttagtcttcttggagctcagcattaaacagctgggagccctttctgacagctgggagccctttctgacagtgcagattccactgctgatggcaggaagtcagtatcaggcagcatccatccattttctccaactacctttccagccaaccacctatgactttctctcctacaaaagttttatgacaagttaagtagaaagcttagcaatgaataagacctcaagggatttggcaggatggagaaaatgaggaaagtttggaataacattgattgttcctgggaataaatgtaaagtggaaaaaggtctaagggcattgtggtcgcacagaccagggatcaaagcctcactcttccatgtagaagccacctgaccccagttcactgggcctgggcttcagttttctaatctcaacagggagaagaatgacaagacctagttggcacagagtatgttcagtacattttagctctcttcccctctcttgactcctattgtatttgctaaaatgacacttctggtctgaaatggattttttcttttcctcatgtgtgggttttttgttttttgtttttagtaatgataacgcccataaatattgttttaaatgaaatcagatttagatatgcatttttaaattacttacttttgaatagaaggacaagactatgctgaacagaataaaattagaattgtcaaggggtacctgggaaatgtgacagctctatccatgaggcaaccatgacagctaaaaaaattggtaacttgtaattggctttgggtctccagtatattctgctgtgagtctcacatttgctctcctaagtctcccaaatggagaggggtctctaacactcttaagctccctgatataccccttgatacctgtccctgagactacttgtttccatacactattgttcctgatattcattcacctccaagtccactcatcttttaaaatcacatttgaataggcatgtgtgagagaggctaacacacctgtaagtcaaaatcccatggcgcgctgtagaagacatcccagtaaggctaaatgagcaagggtttcagaatcagaggcctaaattctaaccttggccccttcatctttgtacaagagcagcgcttatgtctgtgggctgttatataaaatctacaaatacctgtcattcagtccagtttcccattcaatgagaagcccctttcatcacattcctagcagatagtcaccccatctctgcttcagttcctccagtgacagagacctcccttttctgaactgccatataagtttgtgcaatttgggtattgcacaaaagcaccaacctgaagaggcaaatgggagctaaaatcgagtccccattctgcatgtaaagcttgttgcctaaaagggatgcctttttcttatttgacggtccataaaaggctcctttttctaacctcacaaaggcaccatatagactatcagtgaccctgccaggtcaacacactccagcgctcactgaaaaatagaaggaacttcaacctctgccatgaaggatgttgtttcagatgccaagtggacaatgagactgtgtcctttggctcctcttagcaagggccacgaccccaaatgagcccaggtgttgagagaccagcaattagttgccgtccaagctagtgtctctgcaagagaagaatataacaaaataaataaagacctgcagcagcacaccatgcttgatcatttatcaaattgcaaaatcttatccatgactgtgaaatggctttatagttaggaaaatgtactaataatgttattaggcagcaattaaacttaaattccttttaactgtatttgatgtcattctttttctgggcccattagactaacattaaggtgtttgtgcagatagctcagtcatttcaaattactttcttgtctaatgtgggagcctttaatagcatactcttaggttgaattcaattttggagacaccaggcatgctaattagattgtctcagtgttccttgcagaagaagccaaagaagagctatttttctccctcttctgcttagcaatgttcatggaacacaactttctgtgcaattagaggtatagaccctttaccacacaaaatctcacttgaaccgtaagtattgctagcagacacaatgtctggttaatatgccaccattgttgaaatgtttttaagttctcattagagccagtaagttttctcccctattattctgagtatcgtagccagtgtttgttctgtctcagcatgttagagttggaagagagggagaaataagtgaacatttattaggcacctaccatctgccaagttctgggtgagatgtttaatgcctccaacagccctgtgagctgtgggtcattatctccatttacagatggggaaactttgactcagagagggtaagtaaagtgcccaaggtctcacagctggcaggttatggagttgggatttaaacagatctgactctaaagatatggtcttccccttctcttagctcctctgcttactggtttggaaacttagaaagtcactttaacatcttgatcatcaagatcacatctataaaatatgataataatattcaccccctcacagtacattgtatttatcaaatatagtaataaacgtaaatggcccttggagaaagtgaaatgctatacatatgttgatgaaaagcaactcctgagggaccttagtttccccaggctgatatatggatcagatgggatagtattatgtcaaacatccagcccacggcccagaactcaaacattcaaccgaacaataatttcatcatcatttcaaccagccttagtccctggaagccttccaactatgtaatctctgctcatttacagattcccttttctaagtctcctttttcattgatctattaacataaattctttcttcaagtagtcattgcacttggcattgatctactaacttatagctattacaatcatgattgcaattaccatttggctccctgcaatgctatcatcattttctcttggttaccatgataaatcttactaataactcctgcctcagatcctttgtggaatgaggcaagagattaatttattaattgatggattaatgactcataacagttacagtcatcattaattgctattacctctgaagcatcaaatggttgagggggaataagagtaaggctaagtggagtgtttcttcctctcagagggccagcctggtagagaaggtgaaagctgtcaccagccaggcagagaaagtaaatgtcaccttgggagtatgagtgtattaaaactgttatggcacaaaccaccgctgttccaacccattcctttgtcttccctggctctgacttggctttccccataactactgtgattctttcaacattagacatccagctctgggctgctggcccttccctcatcccaaggtcattctccacccaggaattcctgagagccagccaggcaagataagaaaacaacaggcctatttgcccctccagcctttgggatccctgaaagctctggtgagtgcagcaagtagctacaaacttgtcaccctgtctttgagagatcactcatccttgagccctcagattccgtggaacccatggaagaccagagctcaaagtcagaagaagggtacaccatgaagaacccaaacttttcatcagtccacactaccccatctccattcatacccagctctcctgtgtaagaaaggtaacccttccagagccacatgaatctcttgtgcaaccctcttagccatgcagcatttctgcttagatacaagagtggtgccaatgcaatgcacatgcttttgctaaattattcccatcaaggaaacagtattatacattctgcttatcacagggtctacctgtaatgaccccccaccatcagcaaagccaatcattttcccttaaatattatagctattgttcattactattggctatagagtttagtttgaaggtttgcccatagcatatcccccatcctttaccatccaagatctatatgtatgaactgtttttcctctatttactatcaactttgaatgtatgtgccccccgctcctttctcctagagagcctttctcatatagacctgacctctctcataactcatctatagaatcttgcaaccattttcctgaaaaaacaatggaaacagaccaggggcttggttcagtgaaaatgttagttaaacctgagtctacatggtaaaatggattatacatagtttaccaaacagatgaaatgtatacacagctaccccaaatagcacacaggcatcactgcagagtaaagttgggttaatgatcaatccctccaaaacagggcattaggaaagcccttggcctaggccagttgaatggatttttcttgggcttctccagactccttttgtctttgtgatggttctgtagtttctgctgattgacctctgaacccaagatgagcagcgccccttctcatcagactggccacttccttatatcagaactgatcagaacattgcaaagagttatttaatatgcccgtctaactgatctggcaaagtggaaggaagactgggcaacctttcaatgccagactttgcatttgatctcatagtcagtaaagattattgagctgaggagtacatcttggtaataacaatatgcatctccctgagttgtctgaggatcaaatgaaataatatatgcaaaatgaatttgaaacctatataggcctgatgattgttattatttctttctgaaggagttcttccccattagtgattcctggcttgtctttggactcctctttcagaaaagcaagccagacacatgtgacaagttaaacaggcatagaagatatttttatctgctcaagccaacaacagtaaatgcatccaacacagtgtgtgattaattgccaaatgaattgtgaaaagaataattgccagaagagtttgaacaagggagggctcagctctaacaagtgggcaagggaagaaggaggatcaggagaggctgtatagaagaacagagattttgtttttggtcttgtgggccagataggatttggattggcagggagaggacattccagggaagataagttatgtatggttgggtggacatgctagggattggagtgttcagggagctgggagtgggggagatgcatttgatgtagtgggaaattgtgaatggtattttctttgactctgtacctttaaccatgccctacataattgtgccacccactccaaccagcctctccaatcctggctgtcccatttatccaacactcactcctgcttatgctgtacccaccctttgccatcctggctcatcttcatacctaatcttgactacatttcccatttatatccttgtgcagggccctgtgaacttgattcaaatttttgacctcagaggtttcttcctcaattcccactcaagcctacagaagtaaagctaacactaagccagatcttcgtgtgagatcttgaaatcttctatctccttaaagtaatcctgtgaagtgaaatttcttttacccccattttgcaggagaggaaactgaggcttgagatgttaattgtgagcactgtgtattattagtccactttgcattgctataaaggaatacctgagactgggtaatttataaagaaaagatatttatttggctcatggctctgcaggccatacgagcacagcactggcatctgctcggcttccggtgaggtctcaggaagcttttactcatgacggaaggcaagggggagcaggcatgtcacaagatgagagaaggggcaagagagatgccaggctcttttaaacaaccagctgtcctgtgaactaataaggtgagaactcactcattacctcagggaaggcactaagccatttatgagggatccacctgcatgacccaaacacctcccaccagacccaactccaacattgagggtcacatttcaacatgagatttggaggggacaaatatccaaaccatatcagggtgagatttgaaccccaacctgtctgaccccatagcctaactcccaccactaggcagatgacaaagcctcttattgccttggcccaccatattggtttttttcatcgttagtacccttggataggatattttactctaggcaacccttggaacttagaccctgcctcatattgccatcctgccgcaaatccttgggtagcaaggacatgtcataggtaggaattctcagtgcagcagttagtttggggtcctaaaagactttattttctttttgttgttgttgttttttgagtcagagtctcgatctgttgcccgggctggagtgcagtggtgcaatctcggcacactgcaacctccacctcccagattcaagcaattctcctgcctcagcctcctgagtagctgagattacaggagtgtgccaccatgcccagctaacttttttttttgtttgagatggagtttcgctcttgttgcccaggcctggagtgtaatggcgcaatctcagctcaccacaacctccaccttcttgggttcaagcaattctcctgcctcagcctcctgagtagctgggattacaggcatgtgccaccacgcctggctaattttgtattattagtagagacagggttttgccatgttggtcagactggtcttgaactttcaacctcaggtggtctgcctgcctcagcctcccaaagtgccaggattacaggccactgtgcttggccaatttttgtatttttagcagacggggtttcagcatgttggccacgctggtctcaaactcctgacctcaggtgacccacccacctcagtatcccaaagtgctgggattacaggtctgagccactgtgcccggcccgtaaaagactttcaacaccagcatttatatttgattctattgacagtgcaagccagtgaaggttttaagatggttataaacatgaggataacatgatcaaatgccatattttcagaagataagtcctggacacagtccaggactatcctgcctcttccctcctatacaatgaagaggtggcaggaagacacaatttgcaccctattttgtggtttaagttaaggttataagagtctgaattaggtagtggtggtagaaatggacagaatatgataataagtaattgactcattttactctgaaataaatgtatttcttctgaaaataaactttctcaccaatagcatcatctggaaagaataagctcatagcttcataactctcggggacccaggatgtatctcaggtgtatcattgttccttggttcatattcttgaaacttttggcaacagcatgatgtggagggaagcttagggggttgaagtcaggcccgctttctagtagtgactctgccactcaactaaccatgtgaccttgggaaagtccttaatctctctgagcctgtcttctcatctgtaaaatggggttaatgtctgtcacacagggtagttgtgaggcttaaatacaacagaagatagaaaagctatgatgagcacagaataaatgtcagtttttatactatcttttcttagccaaacatctcattaaaagccctgagtaatcacccttaaagtcatgtttgaaagaaaagtgattgggtttaaccaaccttttagaaagaaatttggctttccaaatgttttccactgtgtattaagacacataaaaatgttcatatcttttgacccagttgttccacttctcagaatctattgttaggaaattgtcctcaatacagaaagagtggaatgcacaaagaggttcaatgcacagatggctacaatagtgaaaaatcagaagcaatttgaatgtccagaagccaatgattgcagagtcccactgcagtctgctgatactttaaacatgctttaaatcagtataaaatacacagctcaaaacaatatgaaaacgggcaaagtaaatcaaggatcaaacattcttttcttcgattcatcacctcccacctctgatgtccaaccccactcttctgcagggcttccctgtgtggcccatataccaacaattctctttttctgccatctgggtactaccagggctcatttgcacagcattaagcttcccacccagctgcctaagccccctcggaggcaaatctcagctctttcccctgcagacacagaggttctctccaagcttggcagttttttggcacagctctctctctgtctcccaaggcttccttgctctggccccaccccatatccctattaccttcccacttccaacttctttcccgattgtctccaacgcagttcgctgtgcccttctaagttagagaaagtattttctcaggtgtccaaaatttgttcatctacataaacttaaggaagagggaaaaaagatagattttgatgtcaaagtttatttagaagccagtttacactcagtctccaagtctttcagtcttgactgcttcgtggaatccctcaagagaagactaaaatgttattaaactacatcatttcaaagctggaattcatgaagttagaaacacagacagttagctggtcaaaaataaaaataaaaatcacataaagtcatgtggtgctacctgtattttgtaagcgggcacttcctcttttggtaactccttgaatgaagagcatttggtttctcttgagtttgtataattatatgcattgtgcaatttcttagctttggcaggcgctgggtagcatttggcttcagcactttcaactctaaggacaatttcacaattgggcttttcctgtcagctccaacatctggacccaggggagactgggtccaccatgcgatgaaaccctatgtgaacttcctcagccaagcaagaacaagctgtacaagggcaggtccttccctcactccaggagcctgaaagcaggtctttcactgtggctgccaggttatggccattttttaaaagaaaataagctgatcattttttaaaatgctgctttactggttgaacaataatcactatttcaaatcaatatttattcagcacctactgcatgccatgagttccaccctgtgtgctggaatacagagacagctcctgctaatccatcctgcctcttctatcttccttcttctttcctccttcttccttccttccttccttctttacttccttccttctttagttccttccttccatccttcttccttcctccttccttccttctttacttccttccttctttggttcctttcttccatccttcttccttcctccttcctcccttgcttcttttcttttctttttctttttcttttttttttttttgagacagagtcttgctctgtcacccaggctagagtgcagtggcatgatctcggctcactgcaacctccacctcccagattcaagtgattctcctgcctcagtgccccgagtagctaggattaaaggggcccgccaccgtgcccagctgatttttgtatttttagtagaggtggggtttcaccaccttgaccaggctgttctggaactcctgacctcatgatctacccacctcggcctcccaaagtgctgggattacaggcatgagccaccacgcccagcttcctttcttaaatattgtttaaataatgctgaaaacaaaaaagaaaaaagcacttacaatcccatcacttggtatataaagaataaaaaagagcattgttctaaagcttatttagaagcccatttacacttagacctcaagtcttttagccttgaatactttgtgaagttcctcaaaagaagagtgaaatgttattttaaaccacatcatttaaaaaatacattgctcatcctaccctctctgagtccgctgctgcctctggtggcctggggcagggaatccaatgcctgccccaactggccacggcagtgatggaaggtggaccaatgagaactagtctctgcctaggaagcactcgtaggttatgttatatacaaaggatgatgccttcacagtttaaactctccccttaatttataaccttgtgctgagctttctgcctctcccacagatcttccagtcccacctcctctcaagtagaactccttaaatgtagagttgtttccttcttccttccccacacacttaaaacaggcaggcacattttgttcttcatgaacgttcaggacccgcacactgtgaaacaatgagtgaaaggagtagacagcacggactctgacttcctggctctagaaaattccttccagagtaagtttgcatgcagttcactgttgcacacagtcctgggccaaaggatcccaaatgaaagcaaaaacccatcaagagaattgtgatttaaaagttaagaaaacagcctgtgcatatttttagaacagcccagaaaagaatacatctgtgacttgaaacagctggaaatctactttctgccaaaattatgctgattatgaaagctgtaatggtcagacaagagacagtcagaatccaaggagtcctgtattttcatgtattcaactttcaaataatctttactttcatacattaaacattgacccctctacactgcctttcaaacaccaaatgccagccagccatgaagtttttacagccatgtttgtataattgaggattttattgtattttgcccttatcagtttagtagtaagaatgatcaaccaaaagaacaaaagtaatcagaagcgtgggttttataaactcataatatacttcagaaaataaagaaaattatgaggcatcctgaaaacagaataacattagccctggatagtcattgggttacaccagtcaaccatgtgttcaattctgaaggaaaacaaaattttaaaatatgtgtgaaatgttaaaaatattggtaacaacttatggctaaaagacaaggtatcattagggatatatatatatatatatatatattaggattactgaaaatgaagtcttctcctacttggcactctgctagggtatgtctgtcattcactgttatgtcctcagtgccttgcacataatagatgctccataaatatttgttgaataaatgaataagtcatttgtagctttgacattttaaagaatttattatgcataaaagtagagatatatttgcctgtctctaaatatagaaagagaagtagaaaaaggatttctgaagctgccccgtcaatgtgcgtagagatggatcaatctcttacaggggtacaaaaggtgaatttaagcagaaagggtgacagtgagctgtttgtcagactattgtccaaatgccctccctcacggtacaccctcctccaagccacacatacccctgactgaaatcaggcaaaaaaacagacctggtaaggccaggacaaagacaaggcttaggagtgaggtgccccaccccccgcccccatcacaggatgcaacgtctggaaagaggtgggacaggaagttgtgcccgggggagaacatcaaattctagtccaatatagtccaaactgaggaataaaatgaaaatgtacaaccaaggtaaagaaccaaaccagagatgctggtgagtgaagagcattcaaatggacatttctagaggaattctcggggtagagtgcaggcatccaaactggtgtttcccaccaacttgctgtgtgcatttgaagaaaccagagcagaatgcatgcagctcctatgcaaaagacggataaattacaacacagaaaagacagtctaaactcgtgcaccagcagagcaagtctctgatgtatttgctccaaaatgtaaatgatgaagccaaatattggacacagttgagatcaggcactggaaaattatttcaatggtgccaaggccacacgcatggaggaaaagcagtgtcagcagcaagtgtggtgagaaacagggtaaaagcaggatggtcctgagattctaagatcagaaccaggaagtgttggcaggaaggcctgggagatgatcagaacagttctccctccagagaggacccaagcctcactcgcactgccacgccaccccaatcttgaaggtaccccatgccgaacctcatcactgacagcttgtgaaggtgtataacgcccaggaggagttgtggtaaacgtatgcacacatatatataaatatcatcttgctccaaggtttttgaggatggtgagctctgcttgtcacaaaggtaacaggggtggtcattggtttcactttatgtgaccttaaagtgcattttaagtgaactcacattcaatgtcactttgtgggatgcttggggaagagggtctcctttagtgtccagtcttctgaggctctgccttttccctctctggccctcctcagacaagcagagctgagactctgccttcaaagctcgggtattgcctggaatccctgaggcagtgctagctggggaatccagtcagctaacacatgcctctcagacagtctatactctctcctctgacatccaggagggctcatggcagggccacacggtgagaccttgcccatcacacagccattacagaggattcccacagagccttttgacagtggtggccactcatggctttcagagtatgctgcttccctgaggagctcaccaagggctgtgatactctcagaagtgcctctgaaaggcagcagtttacagaaggacccctgctgagcccctggtgaagctgagctgctgcacagcttgcccaaggaacacgttttagaaatatcttcagatccactgggactgccagaggctcctcatcctgtgcccagcacaggccagtggttctagcccttttggttcaggataaaacttcacccttcctaggtttttgtctttccactcatccctcactggtgaggtaaaatatgcctattaaatcttcccattggtgtgcgagagtcaatatttagggtacttgacaaaagctctagattcctcttcctctgagtccttacacagcatacacctatgggcatggaattgaataatctgccagtcctccatttccttcagctccctaaacagcaaatacaaactgaacttcattagcaactccaacttgaatggcaaatgccagccactgggtcagctcaaagctcaaggataaatttcagtggtgaaacatccacagaaaaccctcaagtgggagaatgctaagaaacagtgggaaagaactaatgggaatctaggcctacttcacacacacacacacacacacacacacacacacacacacggactgcctgcgtggctggtacaataaaagtgtgtatttacactcgctcatctatttcattacaagggaccaatcacaaagacatttattttgtcttctttcctgctctggtaagctaattacaaagtaattgaattagctacagaataaattagttgttatcaaactgcaagtaaagggattcttctaaaaatgattttagggtaaaacactggcttgcacaattattccaggttaggaaatatttttaaaatttattttattaatatgtttattgtaggaggaaatcctaaatttaaaggtaaacctaaagtaaatatttattctacctttaatgaatgacaaagaaaggaaagcatgggtaaattcttgaaaatgctagagggggcagtctacgtgaaatgtttacatgataatctttgttggttgaagtcactgaaatattgaaacgtctttagtggtgagcaagtggggtggaatggtgcttactctacataatgttcgatttagcacccttaccacatgtaattactaagtagccagaaagaatgtctttttcaaaagtacatactctgccctcttaaaaatctcaaaaatagcatgttttcttttcaacttctaaattacacttctattaaatgctatgcagagttcagaaaatggctgcctctgatcaatctggtgtgcaaagcccttcatgaagtcatatccatttgatcataaataagctcaaagataccttgcaataaaagtgtcaggctttcagctctctggcaaagtagaagttatttatacattgaaagggtgtgggatattaatggcaaagacaaaaatgattggaaaaggcctggaatcaaaggacaaaagctggaattattaaacacaatacaacataatgccacaatcagaaacactgtaataccatggaattcttacagtgccggtcaaattatgcccatgagcataatacttgagacttgagggtgaaatgtcaggtcctatacttgggcctggaagcaacagcacaattacaagatcaaataacagtattgggaataaaaatagtttgcaggttttagtgggcagtgaactcagagttcatggcatgcagaggctgcagaaaggccaatttgaggatggacagtcctacaaggcatagtctggaagcagggttcttaactggggctctgttggtggggagtggatttgggagtcacagcctctattgtcagacatttatttcacagtttcatagcaacattgtcatgattagctatgtacatataactttgcaaccatccttaatgaatacctaaggatcatcctagaagtgaaatttctgggtctgagggtgtatacattcttagtgcttttaatacatactaccatgtgcctctagaaacattttctgtttctaataagagcagttgaaaattcctgtttccccagctatccaccatttgcctcatgattttctctaggactaaattttaaagtagagtctttaaagtagaagggagtccaaattccatccctttcattttataggagaaaaaaaattgaagcccatgaaggataggcgatgtgtcctctaataccagagcttctcagggggagagaagatgggggtggctatagctcccttctcctggccttaggcctgatatagaacaggtgcatggaaacgtccagcatagagaaatctacagaaacagaaagtagattagtggttgcctaggcttgtggatgggagggaagatggggagtgacaactaacgagtatggatgggtgttttggtggggccattgaaaatgttctaaatctattgcggtgatgtttacacaacactgtgacgatactaaaaattattgagttactttaaagaggtaaattgtatgttatataaaatatatcccaataaagctgctattttaaaaaaaaatgtgctcagtaaacatttgtagaaggacagaatagagggaggaaaacagatcaaacatccttgttccttcatttccaaccagtggtctttccactttctcactttcactgaagtagaacatgtctaaaattgtccccagctcagtgctgggtttcccctaggtgtttccctgtgtttcaggaatgtgtttttttagtaaacactaacctgcctcttccagaacttttgagtagagaattttttaaatctgagcttcaggccaggcatggcagctcatgcctgtaatcccagccctttgggaggctgaggtgagtggatcacttgagatcaggagtttgagaccagactggccaacatggcgaaactctgtctctactaaaaatacaaaaattagccagatgtagtggtgcatgcctttagtcccagctacttgggaggctgaggcaggagaatctcttgaacccgggaggctggggttgcagtgaacagagatggcaccactgcactctaatctgggtgacagagtgaggctctgtctcaaaaataactaaataaaatctgagcttcagccttttatattttcctgagaatctagctcagggctggtcacaaagtaggcacttgatagatgcttatttactgaaatactggtgaactgtatgtacattaaatattaagtaataaggcagtaatatagcattattttctaatattgatgcctaatttctccagctgtcagttcaagctctgtcaattcagttggcagttaacactctggcatttcagagattctgatctccccccttacatttcactgtgcatagtgagttgttacgggccccactttgccctcagtgcccgaaagcacaggactaaatttaaggctcagaagtattgactgcagcatctggggggcaaatctagaatccatgaagcttaaactttattcactttggaaggaggaaaggtcctctttaaaaataaataaataaataaataaataaataaataaacaagtgggggctgcgcatggtggctcacgcctgtaatcccagcactttggggcagtatcacctgaggtcaggagatcaagaccattctggctaatgcagtggaaccgcacctctactaaatatacaaaaaaaaaaaaaaaaaattagctgggcatggtggcacgcacctgtagtcccagctactcgggaggctgaggcaggagaatcgcttgaacctggaggcagaagttgcagagagctgagatcacaccactgcactccagcctgggtgacagagcgagacttccatctcaataaataaacaaataataaaaataaaaacacaaaattataaatgctaagtacagcaccttggaaggggcctgaccaaagaagcttcctcagcttcctgataagtctgcttgtggctttgttcgtttctctctccttttcattggatttaattttgtttttatgtttaaaagtccattgttagtagcaatttagcatcataagcctcctaattcttcttaaaaatacagtgcatttaagtaattgtgtaattaactacccacaccatctagacgataactagaatggtggggcatcccatctggagtggaggatgggctctcaaatcggtgcctaatgtgaaaatcacacatagtcctaattgtctttaaaatctcttaaattgcctgttaagtacagaatgtgtggttttatgtgtctgaccttgtcagtagttcttagacatactcaagtttgaaaatcactaagccagaccaaaggaaggaaaatccaaatgcaggtgcctggaggtaagaacctctttgccttatgaccgctctcaaatctctagcttgaacaaaggtaggtgctcacctgggatgttgactgcctcttgtttttgatactgagcccttataaacttaataaatgttaccagcttggtttgttgctatggaatttgaaaagatgatatatttgaaagctgatagactgggacttggcacaagaggtgctctgtgaatgtcagttggatttaaatctcatttgatcaggtctccatacacactgctctgctaaagatggtgtcttccaagctggtgtttctgtttgtggcctcactacatgacaatcccactcattcagggcgtgggccctggactcagcacctctttcggggtaaataaaggattccttttacctgagggagggttctcaagtctcccatttgaaaacatttcttcatgacaactacatgatgtaactttgtataaacaaaagttatttgaaatgaacttacttaataatttacttgctacatttgcttttttacttctttgtaaagcttaagcttagaaaaggtgcttctgttgtatttgcatttttttaaactgactcgagtaaggcaatgaatgaggtttccgaaagatgaccagagataaatctagctaaaatcagtctcaggacttgagttagttttgttcctacccttatacttatttcactgacataagtaatagtgtttcctactatctactactttgggggaagaaaagagagtccctttggtacagagttactaagcacctaaatatcagccctgtttgctgggcatgtgggattcggaaatgaataaatagtgcacagccttgacctgaaggtcacatatgtctgaagatatttagtcccctagatactttcttaaggagatgtaagggcactagctttcaatgtacttttgagggaagtaaccatattcctccaatgtcttcatagttacattgctttatacaaaaactctcttcgtaatagcaccaacgtctgcctaggtgttcaatccagacaccatgagtcacccagaccactccttcccttcacccccacaacagttgaccaccaagacatagtagctctaagtcccaaaatatccatctctccctcttactcctctatctctttcctggttcaggcctcatcacctcttgccttgactatcaccacttcctaaacttttctccctgtctcccattcccacttcctgccttttcccaatctccctgccttacccagcccatgttccatactataactagaaagggctttttaaacacaaagctaacaatggcaccctcctgcttaaattcctctgtgcttccccgttactctcagctgtggtcctgcacctttttctcctgctaatgtgcatgctcatatgtatgtgcattcagaggttcattcgctcatgcacggttctgagcatgccagctataatcttgccccatcactctggagggtgcaagccctcagtggggaacccctgccttagagcatgaagctcaagttccttggccttgcctaaaggttctttctgatctggcctattcacatctgcaacctcatttcctcccagccacgcatatgtgccctgttcatcagcctattccaaaccgcttacagtaccctcaaagagaccatgccccatgcgtttttacacattgctctcttttccttgaatactttccccccacccctcatccacccatttagcaactactaaccctccaagacacaacttaagaaccaccacctccaggaagccttccatgctccatttatgtccctattctctatgttatatgtccctcccctataagatcatttatggcttcatgcttatctgtaattaatagagtgttcaagtttatagcttgtcttgtgtgctagggaataagctccttgagaccaagaactttgggttatcaattgttaagatctcagttctttgcacagtgcttttcatcctaggaatccgctaacatttgatatttgtgggaggaaggaaagaagtaagagaaggtggaactttgaagctgtgatcattttctttccatcaaagccatagcaaaaagaacaatatttttaacatccatttaattaacttctataaagattttttgttgacttcatgaatcttaaaattctttattaaaagatcttttggctggtttcttcattctcacttttgaggatttgtcttaaagttatataaaggattcataggagagaggcagaggtggacagattacttggggccaggtttgagaccagcctggccaacatggggaaaccccgtctctgctaaaaatacaaaaaattagctgggcatggtggtgcatgcctgtaatcccagctactcaggtggctgaagcacaagaatagcttgaacccgggaggtggaggttgcagtgagccaagatcacgccactgcactccagcctgggtgacagagcaagaccctgtcttaaaaaaaaaaaaaaaaaaaaaaaaaaaaaaaaagatttatgggaacattcaatggtcccaggtttcaacaaaaactctgtagctctagaggatggtggccggaagttgggctttgaagtgaaacagacctgtgtttgaatccctcttggccacttagtatctgcatggctttggcaagttacctacctctctgagcctcagtttccatatctgtaaaatagggatactaaaactaccaactcctggccaggtgcggtggctcacacctgtaatcccagcactttgggaggccagggcgggtagatcacaaggtcaggaggtcgagaccatcctggctaatatggtgaaaccccatctctactaaaaatacaaaaaattagccaggcgtggtggcgggcacctgtagtcccagctacttgggaggctgaggcaggagaatggcgtgaacccaggaggcagagcttgcaatgagccaagatcacgccactgcactctagcctgggtgacagagcgagaccccatttaaccaaaacaaaaaaacaaaaaaacaaaaaaaactaccaacttcatagcattagtttgatttttttttttttctttttgagacaaagtcttgctctatcacccaggctggagtgcagtggcacagtctcagctcagtgcagcctcaacctcccgggctcaatcaatcctcccacctcagcctcccaggtaggtgagatcagaggcctctgccaccacacctggctattttcttatttttagaagagatgaggtctcactatgttgcctggtctggtctcaaactcctgggctcaagtgatcctccctcctcagcctcccaaagtgttgatgttataggtatgagccacctcacccagcctagtttgaaatttaaatgataaaatacatacaattgagtatatacacataagtatttaatgtatgatgatgattattattattacaaggacaaaatctagtgcatctgatcttaagctatggtttcatagtaggtgactgtgaagtggtggggggagtccttgaaaggagaaacaaaaaattcagtgggaacttagataaggagaagatggagaagtcattttttttcctaatctgtttagctcattctcttataattaaactgcaagattattccttcaactacaaaatggataaattattcattatattgacttgtttgaaaagatatcatagtttaaaattgaatgaatttctctttaatatgattttctggcaagattagattctaatgtggattaatatcctaaattgagagctctaattgaacactgtgggaaccaagcatgagtcaaagacatcgtccctttacaagtggcagtcaccgaggaaacgttcacttgtgtgtcagagggacacctaacatcagcaagagtaacagtagctgaggctgaatgaaggcttgctgtgttgggtacgcatgtcaagggagacgcaggacgctatttgcctcacatctccctcatcttgcagtcatcgccgtcctgtgccttggtggagtttttagtgtatgcagcttctgtgaacacaaggacctccccatcatgtccattgcactccctccatacctagcacaagtgcatggtccggagtagtgcccagtgaatatgtgtcaggacagtggggaagggaggaggacaataccctctaacggccccagagtctgtgccttctggcccagattcagtcagactccaccaaagtcagtctccaggactctgttttccaagtttgttcagcccttccccctcagctaacctgttcgtccctttgagccaaactcactgattagcattcagcttctttcactttcaatcatgccagacccggtgtttcatgcttaaccgttagggaaacatcctgtcttttaccatgatttttgcaggtggctaatatcatcaattattttactcactcaactctcagagggtaatcacttctttgattcaagtttcaaggccatctcactgtgggctcctatacatcaccgattacaccgggcagagtcaagcagaggtgctggccctgttctttacagattcatctggaaactatggtgctgttaatctgctctgtgttcatgctaatagtgtctgtctataatcaacctcaatctaccattcaccacgccaaaaagataaatgccagacttcagaaaatgaactaaaggcagccctcaaaccccagaaaatctcctgtccacccctgccagggcgcaagatgtcctgatttaggaggttgatccctcctctaattcctccttagaatgtatttcaaaatcaaaagccaatagttacatttctaagcaacggagcagaccaaaaatgttttgtttgacacagaagcaatagaagcaagaccatgtttctattttatgaaacctctgagggtaattcactgaaatcttgacatttaatatcacccaatcacctctctagcaagctattttctttggctccattaaccccacacacacagactgggctgctggcacttactgggtcttgtcgttaggtgggctgcttttaataccagggcaggatttggcaggaagaagtggcacctgctttattgaaagacatcttcatattttagcctctgaaagagaaatgtgcaacataaatgtccttaagagacgattatcgtacatcaagatgtccattccaaaaggcattgtaccagatgcccaatcacacacagtcacccagaacagacgtgacagatggagactttgagcttttaaagaaaacaaatgtgcaaattccaaagtgtctgtgtgctccaggccagcacatgcccaggtaatttgagttgtgcccattggctgaaagataagattcaggcctcagagagggtttggggagaggatgagtacaggtttcttgttgcccagagtctccaaatagatacacacaggatacaccacctcagcccagagatatttaagcactgagttaaaagaaaggattgagcatgcagcatcaattgatacattaatgctggttctctggcatcagggaagacattaacatacagaacttgtcttctccactgttcaaaaatgggaagaatcattccaacagggagagcagggaagtccaaaatccataatgctcaggtacaaagtaatgaaaccagaaatccagggtatttttgctattactaccaagggcctatcttcggtgtaatggcaatcttctaaatctctgcatagtttgacacctgcaaatctgattgagtctgattgaaccatttgctgtctaaaatccttgggagaccccgataacctagagctgtagctttcaaattgctccatgggctcgggccaaggcttccacagggactgagggaggaagggtacagctcttgggcacatccccttggctccagtcagaaaagttatttcctctgttttacaaattgagcttccaagtaagattttcttcttttctctttttatctgtctctgaggttgggtacagtggcatgatcgcagctgactgcagtcttgacctccctggctcaagtgatcctcctacctcagcctcccaagtagctatgaccacaggtgtgcatcacctgtggtctaatttttttattttttaattttttgtagggacaaggtctcactatgttgcccagactggtctcaaactcctgggctcaagtgatcctcccgcctcagcttctctaagtgctgggattacaggcgtgagtcaccatgcccagctccaagtaagattttcaacaaagagtcttgaggcttaaaaacaaagtatgtttgaaaagaaggggtctgcaggattaaattcagataagatcctccccattcttttttgtttgtttgtttttggttttttttttgtttgccaggctgcagtgcagtggcgcagtctcggcttactgcaagctccgcctcccgggttcacgccattctcctgcctcagcctcctcaatagctgggattacaggtgcccgccaccacccccggctaattttttttgtattttttagtagacacggggtttcaccgtgttagccaggatggtcttgatctcctgacctcgtgatccacctgcctcagcctcccaaagtgctgggattacaggcgtgagccaccgcgcctggccgatcctccctattctttatcctgtcttcctcttagacgttccccagcacacccagataatccagtcatgtccagtgacttccttctctctatatcaaagtttccttccgttccatttgcctggaatgttctcccttttctcttctctgcatggtaaatctgtattcttgttttaagattcagttcaaattttgccttcggagtactaccattcctgcttagcagcaattatccatattcccactgcatttgtgcatgtgttgacgcatatcgtattattacatgtgtctgaatcttggatcagtctgcacactcatagaatatagagtccctgtcttattctgtcctcctccatcttcctccagggcctggtatgctgtgggcactcaataaatatttgatggatggatgcttagctatttaattcaccactagatagcaatttggcatattcccaaacaattttattcagaaggaattcaaagaaataggcccacattctcataaccaactcaagcagctctatgttaacaaagaatataactacttctaactacttctgtttaggtcggagttttatttttttaataaaatttatgattgcaacaacattaaaagagatattgtatagaggtcacatgctgaaagcccatggacaacaacagtcttttaaattggcatggtttgaccctgccaatctgattgggtcatttcttcacttaaaattctcacgagacttcctgttgtctgtggagttcagaggtttctaggacacctccaatgctaaggcctccacatggaggcctgaatggaaaggaagtggctcagggtctcacaccttttgcttcagtcaaagaggttctacagaatcaaagtgttttttgtcttaatttctttttattggaatggctatggctgagcctgactctccaggtttccatagttcccaacacttgctactttccccatccatcttcacctgcttgattcctgatatttgagtttgcaactcaaaactcacccctaaccccagccctctaaaaccgttttcatttttatgaacctatttccaggcccagagcactatgcctatttttatatatacttgcaattgtattgcatatacaattttatattctgttttcttcacttaacactgtatcataaatatttttccagtatgtgagatgtgagacacagcctctgatggttactttttcttttttgagactgagtcttgctctgtcacccaggctggaatgcagtggcacgatcttggctcactgcaacctccgcctcccaggttcaagcgattcttctgcctcagcctcccaagaagctgggactacaggtgcacactaccacacctgggtaatttttgtaattttagtagagatgggtttcaccatattggtcaggctggtctcgaactcctgacctcgtgatccgcccacctcagcctcccatggttacctttttaaatgacaagtttttaagttggttggctctaatttatttaggtcttctgttattgttgtatcaactttttatttttttgctcttagaagtaataattgtgttgaaaatcttcatacatatgaattttttctaacaataaaagtgttcctcatattcccattcacaattgccacaaaaaataaaataaaatacctaggaatacagctaactatggaggtgaagaaactctacaaggataactacaaaatactactcaaagaaatcacagatgacacaaacaaatggaaaaacattccatgcccgtggatagggaagagtcattattgtgaaaacagccacactgcccaaagcaatttatagattcaatgcaattcctattaaactaccactgagactcttcacagaactagaaaaaaactattttaaaattcatgtgaaaccaaaaaagagcccaaatagcaaaggcaattctaagcaaaaagaacaaagctggaggcatcatgctacctgacttcaaactgtactacagggctacagaaaccaaaaaaacatggtactggtacaaaaacaggcacatagaccagtggaagagaatagagaattcagaaataagaccacatgcctacaaccatctgattttcaacaaccctgacaaaaacaagcaatggggaaaggatttcctgttcaataaatggtgctaggataattggatagccatatgcagaagattgaaactggacctcttcattacaccatatacaaaaattaactcaagatggataaaagacttaaatgtaaagcccaaaactaacctaggcaataccatttaggacataggcacagtcaaagatttcatgacaaagaagccaaaagcaattgcaacaaaagcaaaaattgacaaatggtttctaattagagcttctgcacaggagaggaaagtatcaacagagtaaacagacaacctacggaataggagaaaaattttgcaaactgtgcatccaacaaaggtctaatatccagcgtctataaggaacttaaacaaatttacaagaaaaaaaccaaacaacctcatttaaaagtgggcaaatgacatgaacagatactcttcaaaagaagacatatgcgactaacaaccatatgaaaaaaaacctcaacctcactgatcattagagaaatgcaaatcaaaaccacagtgagataccatctcacaccactcagaatagctattattaaaaagtcaaaacataacacatgctggcaaggttgtgggacgcttatacactattggtgggagtgtaaatttgttcaaccattgtggaagacagtgtggcaattcctcaaagacctagagacagaaatgccattcagcccagcaatcccattactgggtatatacccaaaagaatataaatcattctattataaagacacacgtacacgtatgttcactgtagcactattaacaatagcaaagacatggaatcaacctaaatgcccatcagtggtagactggataaggaaagtgtggtacatatgtaccatagaatactatgcatccataaaaaagaatgagatcatgtcctttgcagggacatggatggagctggaggccattatccatagcaaactaacacaggaacagaaaaccaaatatcacatgttctcccttataaatgggaactaagtgatgagaacacatggacacatagaggggaacaatgcatgctggggcctattggaaggtgaaaggtgggaggagggagagtatcaggaaaaataactaatgggtactgggcttaatacctggttgatgaaataatctgtataacaaacgccagtgacacaagtttacctatgtaacaaacctgcacatgtacccctgaacttaaaagttaaaaaaaaaaagttgttcctcattttagcacattccttatacgttattgattgtattattttgatgcaaatatatttcaatatgtttttcttttcacttctcatatttttatgattaaaatatgttaaatgttacccagatgaatcttttgatcacttccattgttatttcttctattgcttcaagctagtgagagttcttcatagttcattactaatagctcccaagatctcatgcaatcttcattctcttttcctttgattgctctatgtatttaaaaagtatgcatttaactctttaactcatctgagcatatttggcacatgtttaataaatggtttttacattgatcatatcattattattaaataacttctcctttgcccattgtttattgtacttcatataaccaaattgtcatgtataaataggtgtatttcagtgctgctaattctcctctactgttctatatgcctggttttgtgagtactttattaattattattgcttcataatatgtatagaatttatagtactgtagtactagtcttccccaattgaaggtcttcatttttcaaaatatcattttatattcttggcattttgtttgcctcataagtgttaaaattgctttgtcaagttataaaaataagtggcgattctgatttaaaatatatcagcttcttaagtcattgcatacattctaagcatcttatttttgttgttgttgttgttttcgttttcttatggagagagagagaaagggagaagttacccatagttgcatagttgcaccattgcctgagatatcctgatgcaactttgttattgacagctcacagaatggagcaaggttttttgaggcccaaagcttatatgagtgagaggagacttctttaagaaaaataatttttttattatactttaagttcttggatacatgtgcagaacgttcaggtttgttacataggtatacatgtgccatggcggtttgctgcacccatcaacccatcatctacattaggtatttctcctaatgctatccctcccctagccccccacaccccgacaggccccggtgtgtgatgctcccctccctgtgtccatgtgttctcattgttcaattcccacttatgaatgagaacatacggtctttggttttctgttcctgtgttagtttgctgagaataatggtttccagcttcaaccatgtccctgcaaaggacatgaactcatccttttttatggctgcatagtattccatggtgtatatgtgccacattttcttcatccagtctatcattgatgggcatttgggttggttccaagtctttgctatcataaatagtgctgcaataaacatgtgtgtgcatgtgtctttatagtagaatgatttataatcctttgggtatatacccagtaatggattgctgggtcaaatggtatttctagttctaggtccttgaggaattgccacactgtgttccacaatagttgaactaatttatactcccaccaacactgtaaaagcattcctatttctccacatcctctccagcatctgttgtttcctgactttttaatgatcaccattctaactggcatgagatggtatctcattgtggttttgatttgcatttctctaatgaccagcgatgatgggctttttttcgtatgtttgttggccatgtaaatgtcttcttctgagaagtgtctgttcatattctttgcccactttttgatggggttgtttgtatttttcttgtaaatttgtttaaattccttgtagattctggatattagacctttgtcagatggatagattgcaaaaattctctcccattctgtaggttgcctgttcactctgatggtagtttcttttgctgtgcagaagctctttagtttaattagatctcatttgtcagttttggcttttgttgccattgcttttggtgtttttctcatgaagtctttgcccatgcctatgtcctgaatagtataggttttctttttcctttttttttttttttgttttttgttttttgtgtttgtttttgtcgaagtctcactctgttgcccaagcaagctggagtgcagtggcacaatctcagctcactgcaacctccaccacccgggttcaagcgattctcctgcctcagcctcccgagtagctgggacttacaggcacaagccaccatgcctggctaatttttatagttttagtagagatgaggtttcactatgttgaccaagctggtctcaatctcctgacctcgtgatccacccaccttggcctcccaaagtgctaggaggattacaggcatgagccaccgcacccgggcatctaggttttcttctagggttttgatggttttaggtcttatatttaagtctttgatctatcttgagttaatttttgtataaggtgtaaggaaggggtccagtttcagttttctgcatatggctagccagttttcccaacaccatttattaaataggaaatcctttccccgttgcttgtttttgtcaggtttgtcaaagatcagattgttgtagatgtgtggcattatttctgaggcctctgttctgttccattggtctatatatctgttttgataccagtaccatgctgttttggttactgtagacttgtagtatagtttgaagtcaggtagtgtgatgcctctggctttgttctttttccttaggattgtcttggctatacgggctctttttaggttccatatgaaatttaaagaagttctggccagggcaatcaggcaagagaaagaaataaagggtattcaactaggaaaagaggaagtcaaattgtctgtgtttgcagatgacatgattgtgtatttagaaaaccccatcgtctcagcccaaaatctccttaaactgagaagcaacttcagcaaagtctcaggatacaaaatcagtgtgcaaaaatcacaagcattcctgtacaccaataacagacaaacagaaagccaaatcatgagcgaactcccattcacaattgctacaaagagaataaaatacctaggaatacaacttacaagggatgtgaaggacctcttcaaggagaactacaaaccactgctcaaggaaataagagaggacacaaacaagtggaaaaacattccatgctcatggataggaagaatcaatatcatgaaaatggccatactgcccaaagtaatttgtagattcagtgctatccccatcaagctaccactgactttcttcacagaattagcatcttatattcttatattattatacgtgtagttttctaggggtttactgcttgtgtataataatgtatatagtaatgtagtatatatgaaaacatggtgtatagtaatatattgggcatagtaatgctactgacctttgaattttaataccaaactgtcctctttctaaactggttgatttagttccaggtgtacagcaaattctttgtaaatattttttcttctttcccagtaattattgtcctttaagtcttttgcagtttgtctaaagcaatattatgttataatagtagctatattattttcaggggccaatttttgaaaaaaaaagcttttaatcttaatccattattgattcattatttaaaataggtatctttatcaagttaaggtagtaaatagtatcactccaagtaaaggttttatcaatttttcttttgacatatattgaaatagattatgtcatctaatgttaatataatgttagtcttttattgattttttttttttgcatttctttagtaaccttccttaagatcaaatttgtcacacagaataattagatggagtccggccttgtctgtgctttgatgcagtcagcatagcttgggaattatctgttccttgtgagcttggaggaatccattagatctgtatgccttgctttttggggatattctgaatttttaaaaaatttctacctccattactgctttaatagggtttcctacctcattgcgtcatttttaaatataagattgaattaaaatcatatatgtttattataaaatatcatccatttgttcaggttttcagtcagttagcatataattagacatagtattccatataagtggtttaattccttttgctactgaatatattgagtcagacctgaattctcatccaggttccaccactgattcatgtgactttaaccaagtaacttgacttctatcatcatttccctataaataggggtcatattacttagagtataggattgctgtgaggattacagatgatgtatatgaagttcttagcacagtgcctgtcctcactaagtagaagatattacactgttctctttcctaatgctgtttgtctccttttttgctgttctttaattatatttgcatgggttgtctatttttcatagtctttccagtattttcagaagcaacatataagcaatggggagccactgaaggaaagagtaccaactctgataatcgaatgtctgagcatcatttgtgggtggatcatcaaaagatgggtctatgctgtgagaaatgacagaattgacaagaggccatctagactcttcttgccaagcaaaatgtggaagtgtagtccttatattcatagtcagtaaacacagtctccagagcttgggagagactcttttaagggcttctgagagtgggaaattgaccaggcccccagttgtcctgtgcctgcatccaagcctttagggcctggaaacagagatgctgacaaacaccatgacccagactgaacccagcttttcaatgggacaacaaaatgagctttgttcatccttttgaaatggagcccaattatgtttgattaataaatgaaactctgtgtccaaataggagagacactgtagaaaaaatggtcagaaaacactttgtgtaagaaaaggctgatgaagttttcatcagagggctttcatttgcctggagctagtctcagacagagagaaatgttcagcttccaaatccttctcttgtttctcattccttttttttttttcttaaatatgtttaactctcctgcttaagatttattttgggctccttagcgatggatttgtgtttattgtgtcatttaaagaaaaatgcactattaaaaacactcctaatccatttataaatgtcaacagaaaaacaagtcaaaggttgacaatagtaattaatcaaacgatatttattgagcactttctatgtacaaagcactttctatgtacaaagctatatgctattaagtaagaataggaaacagtctccagcctcaagagtccttcagttgagctgaggaaatagccaaataattgactagctataatacaagggaaatggaaataaatattaaagtcagtacataagccacgctgtactgaagtacatatcccagggatggattagcaaggacttcatgagcaagttgcatttgggttgcatcttgaaatgtaagcaggcttttttataaggatgtgttctcttagatttttaggtgagccagccaatgcacctatgtattatgccccagatgtcagcaaacacaagcaactattctaagctagtccatcaaacccatgtgtgcacacaagcacacaatcatgttgttcccaggtcacctatggttactttcctattcctcattgcatttgtcccatccaaatgcttactcccaaacatgcctctgaacctcttcaatttgatgacctccaaagcttagcttcttaaatctggtcctttttacatggtttttggttttgcttccttccttaagttttagcctttcactccatgttgtcctggggaaagaactctcggctctggtcctctgcgcgtagggcccccatccctagccggatcaaatcttggaatgaggaagcgttggaagaattccctgtgttatccacccaggagttgtgtaggtaatacaggttctcctccactccctggccccaagtaagatgatgcttcagaataaaaacatgcccttgcatagataggtggttcccttcacagctggctccttaccagaatggagaacagtcctgctagcatggggttcagagtcttcctgtgtgtgcatctttccaaagatattaagaggagaaaaagatccaagtgaatttccaggtttctccaacactttaaactatacatttgatattcttaaccaacttgatgaacatgttggcctgtctgttccacacaccaaggaggtaaagagaaggcaagtgagatgatgagccatggaattccaactgctatgtcagtcatcaggctagaaaaatgggaggctgtgcattaatttcaagagagcctcggagaactgtctcaggataaatcagccagagtgactggaacattgtaccattttcaactggcaaatttattaatgaagtaagagtacagtctcaagccaactcctcttgcccctgtaacaaactccccctgtgagagaggatgaaggggatgtgtttgttagaatacttagaggccatgagtaacacaaagcctaaccaacagtgctttaaattttgtggacttttactatttcattaagtgaaaagtttggagataggtaattccaaggttagtagagtggctcattcatgtcatcagggactaagacatttccatctttctactctgccttttttatgtttttgtttttgtttttttaagagatgagagtctcaccatgttattcaggctggagtggctattcacaagcaggattatagcacactacagccaagaactcttgggctaaagcagtcctcccacctcagcctcccaagtagctgggactacaggtatgcaccacacccagcccactctgccatttgtaatatgtcatcagtggctccctttatggccacaagatcagtattagcatagtagttccacacattgcctccttaggtgacctgggttatttcttcttctcagagtgctattggccaggttacttgtggtattcaaatacaaatgggctggtgtaaagggtctgagatggtattattcatatgactggaaacttcaaggggtatcttgaaggcagggactggcaactgaagtgtctgcatgactcttcagcatggtggtctcagggagtcagactttctacatgatggcttggggtcctcaaaggcagtattacaaaaggcagaaagtggaagctgccagtgtcttaaggccggggcccagaaactggccaaagcagtcacaaagccccccacattcaaggggagataacatagacccccatctcctaatgggaggagtgtccaagaatttagttatctttgggtcacatgtaggttataagttaagctgttgtaataaagagaccaaaaatatgccgacttaagatagaagtatatttccccttgtacatcacagtttagaggtgagcaacacaggctggtggtctatttctgccagaaagttcccatatctggatccagcatgctttgtctactacttcttctcaagtggtgggaaagggaaaatgagaattgcagacaaacagcttccttgtaaaagataatccaaaatttctacacatcccttctgtttgcatcacattggctaaatgttagtcacatggccacacctgtctgtaagttattgccaaatagaacgtagggaaaatgggtattgaggacaattgttcatcaaggtggttaagaatatcaaatgtatagtttgaagtgttggagaaaattggaaattcacttggatctttttctcctcttaatatctttggaaagatgcacatacaggaagcctctgaaccccatgctacaaaagaaataggtagtgttggaggagattcaactctagacaatgaagttggcatctgtggtggtttatgaatcaaccctgtacctgcaaagggttttcacatctggggctgggtggtaaatcatagggtgctctgaacagatctttaagtattgggctattcacaaaacagaagcaaacaatgtgcagatgcctccccccatgaggagtagctgcctatttgaatctctcactggatggtaatggaaatgatcagttgggttcacttggtagggtactccttagaaatagctaatgaggtttcttattgtcttagtctgttttttgtttctataacagaataccacagttagcttcatagttctggaggctgggaataccaagagcatggtgccagtatctgaggaaggtcatcccatggcagaaggcagaaggcagaagtgattgattacatgaaacatagaggcaccaggggctgaacttactctacaacaacccactcttcaaataactagcccactcctacaataacaacattaatccattcacaacccaaattacctgttattggaccccacctcccaacaaggttgcattggaaattaagtttccaacacatgaattttgggggaacacattcaaaccataacatttactctgaacttcacaaagaccacaaaagaattagttgataaagaatgagctaaatagttgactaaatggtttagcaatcataaatataaagcagcataactattgtgttaaaagcattactatgaggcagatatagcaacagcatcagcctgatctaaccaaacaatgccatctcagtaggatactggtgaagccattccctaggagaaggtggcgtgcgtcataggtgtttgctggactttcttctgccttattcctggttcagagaaactcagtgatccatttttcatcccactccaaagcagatcagatggttgtcttgcttgtatcagagctaatgcttccgtggggagagctctctgtttctgcctgcaagtgctcacagttcggttgtttcagccagcaccaacatttgtttcttagatctaaaagtagccctattcctgtctgctttatatattggagttctgagtatacttttgtttaacaaaatgtgttctattacgtaaagaaaaaaaaagattgatagctattagcttaggaggcttctagaactcagtgcacagccagctcttgctctctcatatatttttacaaatatcttcaagaaacaaatggcctttccactggctcttgagggataattttaataatatatttgcagaaatatttgaaatggaataagggtattatgactgtagacttcacttatttattgttgaatcttgtagcttctgtattaaaaagaaagaaaaaacacttttattgaagacagtatgtcagaaaaaacatggattttttttttttactcaaaaagacttgtgtttaaatataatttgtgccacttattagctctgtgatcttaggcaaaatattgagatctctgagtctccattttttcatgtataaaataaaaataataacaattcctgtaatatactgctattataaggatagttagctaatttatgtgaagtgccaagcacagtgcctaatagtatttgtaactactatttattgaacccttactatgtggcagacactgtctaggtcaatggttctcccttggggacttgttagaactgcaaattctttatcaggccccagcctacacctactgaatcagaaaccctgggggtagggctcagccgtctgttttataagccctcctggtgattctgatacacactaaagtttgcaaaccactgttctgagtgtccaagaaattgaatgtatgattatcatattcatattacactacagctaataatttgtgctgaaacaaatatagatatgtcctcttctattttgtttgatgacagccctagatttttcccaccttagtcatatctgtgaccattccttacaaggagataggcgacctggaaaacccaaatatcatacctccttctccctcccgagtcctctcttcctcccctagcgggtctgcatcctgtctgtgtcaagcagtttatgaaatacctggtgagaactcagccactccagaaagaatgaatagctcctcctgaatgcagctccagcacctggagtcagtatctccctgacttgccattatgtgttcccattggtccccctgataaaatatgatctccctgagggcaggaacaacatcctaatgatttctgtgtccccagcacccagtacacttaatagacacctaataaatgagtggtgaatgaatgaagtgtcagccccaaatcagagggacatttgttcctggagcattcaggtgttaggcataccctagcagccagtatatttctagtcatggtgacaagtaggcaacgggattgcctagagacccatgaaatgttatctgagccatgtcttcattcatccataggatcagttctgtgccacaaggaaagctgtgtgacagtctcatggcagatcagacccacattaggaacagcctagaaaagcaaactgcaaatatccatttcttttctctgtcataatttgttttcccagttgctggcgaggttgaaattagctctgtctgttgacaatttggatacaataacctttctgtttcgtgaattctgaacagtgaaggactgaattctgctctgggctgcagaaaaataacaaagcactcagtaggatagatgggaatggagcacggacttagctgaggaagaatttggccctgctctggagctctctttgaatttattattcctgccttccatgtcttttcatgctaggtgggtgtagaaagccatcctgctcaccactttgtcccccacccactgccacctatgctgtcagccattcatctaacccacttagaagaaccagaatgaatatagatttcttctttcacacattaatttatggagccttcctatttcttctcattgcaatgttcctacctgctgcagtcacattcaattttattgaaaagcagcagggaattcatcctttgctggaaaactttgacaattaaattcaaactataaggaaaaagttatcctagtttcagtctctctttaaatcaaagtgtagacagtatgtagtgggttatggtgaaaggcccccataatgaggagagcaggtaccctctaagagttgaggggaaaaatcgatgcagatgatatgagttaaaccacatacagaagtgaccctgagatctggattttaagtggatgatggccaaattccaatcacaactggtatgaatcctctaaagttgaatgtttgtcataaaactgccacctatttgggtcatattgtagcctgcttgaagaaagatctaactaggagagggtggtctgcatgacctctagaaagacaggagtttgtcggggtcttctgtgcagtccaagaagatagcatgaccagatgacatgatgtgtttatctgcaagccagatctattcccataatgggaggtaaatgcatttgacttagatagctccatgatgtccataaaaaccattcagctaaatacctttgcttcaactctgtgcttcccaggcaatattccattaagattatggcttatcatgaagactttcctccaacccaggcaacatggtgaaaccccatctctacaaaaagtacaaaaattagctgggcgtgatggtgtgcatctgaagtcccagctactcaggaggctgaggtgggaggattgcttgagcccaagaggtggaggttgcggtgagccgagattgtaccactgcactccagcctgggcaacagagtgagcacttggatcaaaaaaaaaaaaaaaaaaaactttcctacatatggaggctgtgttgccccacgcccataagtttacataaagtccacttggcattcctgtttctcactgttgggcatgtcttctacatcttgaaagtttgggtagtgtgagccagttcctctggttgaacccttctgcacataccatcaaattcaagatctggaccaggaaataataggaccacactccggacatggttcagtaaacatcctaggtaacaaaactcttgaattcaactgtgagaaggtgatttttcttccctatctctgtcttcagaagaccagcgttaaagttgactgataatcacagccttttttaaaaaaattcttactaaggtgacattgttaggctgttttgggcaatcctttgaagtggtttttcctcccaaattttctaatttttgttcattatatatttgaaaagaaattcaaattgcctgataatagaaaatgaaaacatgacaagctataaactctgaccttaaaagcatctctaatatagcatcataaaatataattagaaatccatttcaacatcacattacagatctatgacttacaggtaatttctgtcatttaaatatgagggtgagctgatggctgaattggattcttaggagaaaaacaatttcttctgcattaggagttattagtttaattgaataatatctggatcatactggtggtaatgttaatgttattacccattatcttggtgatggtcacaccactgtttccaggaaaaatatagcccattaactgaacagaaggattaaaataggaacaaagtggcaagcttttcatggcttattatgccagggtcaggacaaaggaatggccctgaccttgaaatgggacagaggacccagcctgagctaaatgcctcaaagaattccaagggaagtcctttcaggcatgacagagtgcatttggtttcctcagcatgtcgttctgaacatttctactcattaatttattcatttattcacttactcgttcattcattcaaccagcccattcatttattcaaccaacatattttgtgcatcctcctgaaaccatgaatggtgatagatcatggagagacaaagatgacttagtcaaggagagagggtcaaggcttattgagaacctgctgtatctcagacattataatgggagatttcagacaatatctgttttattcttctcgagaattcagaaggtaggtagagttgttatacccattttatacatgaagaaactgaggttcagacaggtaaaatgacttgtccaaggcctagaaagggaaggagtcagaactcaaacctaggcctgtcttaattcaaggcctaggctatttctactacacctggaatttggacttagaacataaacacatttttaaaacattataatacagtgtgatgaatgggatacacagtcatataaagcaagacagctgccacggcgaaagccagatttccactctaagtgactcatccgacgtttttaggtaataggaaatgtctaggtggccctaatatgtcctccaaatctcttcttcatcctcagccccacacccagctctccctccatctccttcttatcaatggggggttctctgctccccccatcttcacaagcgaagggcatttgttcttccacaccccacatgatgcagggcaagaggaaaggtcaggctccacctcattctcatcacctcctcacctctcattagaaccgtgatcctgtgagcctcctaatgcccagccattaactagcatctgtcctcctggtctctgctacctaccagccttctggtcactcccagccctcagtgaagatgttggccctgggatcactgtcttatccaacccaagtagctcttcctgggactaggaccactttcagctgctgtgaatactggagtcatgttggcaccatgagatattttatcatcctatgaactcatttgggaactcaatgacaggtgatacaatggcctaagcccatttcaaagagtatttctgacaaagctttgtgtaagtacaaaaaaaattttcagaccatgctttttcccattataacatttcataatctcttccttgttttgtccctgcacctctacctccattaaccaggtctcatcaagttgtgacataagccaggtttcatcaagttgtgacaggtgacagaggcgtcacatgacaggggacctgattaggaaatccatatcctcataggatgcactttaacatcttcttgagctgtcttgatattttgagacatacggcaaagattccatatactgttccagtgaccagtgaccttgagaacatatttaaaactatagatttctgtgccccacccagagatcccaattcagtagcgctgaggtgggatctgaacatgagtagacttagaaagcctctagctgattctgaagcacagctagtttggggagcactgacatatagccactgcccatgaacctggatgttcctaaatcttgataccaattgagtgacttgaatcctccctcatctgtatgtataccatcatcaggtcggaaaaatacctccagcttccagcttaaggttgccctctcctttcccaccaccagtaacatgctagtaaacatttaacaataggctctcagaaagaaaaaaaattaagccctgatttataatgtttgccagtttccatggtgtaaatactctcaccagggccaatttccagctaccaatgtgatgccactgaacgtagaggtgggaaaagatgcatgtaattaacattccttagacagaagtcagctccagcacatcactgtcccacccatcctttactgattcccaaagatcaaacaaactacacccaagaaacagaggggtctctctcagatcctacagcacagccagagcctctcagaagtaaggttgtctccattttttaaaaagctctggcatattaaaaagtggaaaagtgggccgagcatggtggctcatgcctataatcccagcactttgggaggctgaggcgggtggatcacttgaggttaggagttcgagaccagcctgcccaacatggtgaaaccccttctctactaaaaatacaaaaattagccagtgtggtggcacatgcctgtgatcccagctacttaggaggctgaagtaggagaattgcttaaacccagaaggcggaggttgcagtgagccaagattacaccactgcactccagcctgggcgatagagtaagaccctgtctcataaataaataaatagtggaaaaagtgctactgcaagattggcaaaattggggtaacgctttaacaccaaaatacgatgcaataaaattgtattaatctcaagattatttataagaattataaaaatattcatttatacttcaccataaatggggtcaattggtagcaggacatgtggaaagccgtaagatgaatgtcattcggttctgtcggtgtatctctgtgactctggagaaaatgccagactctttatctgaggcttttgtgagtgtgaaaactggggcataccccctcaccactccgaatcctgtctccacccttctacctcccaccctcacgccctccccttcaatccatgagagaccctggacatagttttctccctcctaccttctgttctttgcctctcaagaatttccaaagctaggtgccctgccactgggtcttatctgggtcacaaaatagccaagtgacaagaattaaatgtaacaagaaaacactggggggtccaggtcccttctgcaccactgaggacctgcagttagttactgatgacgggctcttttatctggctccagtctggcaagagatctggtggagaattctttctggctttcattttccttatttctctgagccatttctggcaggaatgttataagcaaatcaaattttgatcagttgaagactatttgaagactctaggagctgctgctgattcattcatttattaaacaaacatttatttaatacctcccttgtgccaaatcctgtactagacagtggggaagagggatagagagaggagatgaagagcacacagttcctccccttgaagcacggagagtggaggaaatggatacatgatatgtaagggggtaacagcagtccctgaggcagatcccatgacagggtgcaacgtagggtaccttggaagcacagaggaagggtggctaagctaaaccaagcggtcaggaaagccttgaactgcattctcaaggacaagtaggcattacctaggtgagaaagggttaaaaggattaaaagggagatggtagtttatgcaaagaagcttaaaaaaaacaaaagctatgtggttcgggaaactgcaagtagaatatctttgatatggaggaccctgggttcagaggctggttcctttgcttattagctgcatgaatgggactgaatttagcttctctaagctgcagtttcctcagcaggaaaccccaccttaaaggactgttagtatgcagatgagataatgcatgtagcactctcatatctagcatagaggccatacccagtacttgacagcttggtgatgaggatgaagatgaggatggtggtggctggcataaaggatacacataagggtgaaagactgagggagatatgaggccggagaagtaggtggggccaaagggtgagcccttgggctccatgctgaacaaaattgggctttacccctaaagccaaaggaagaatttcaagagtggagtagcctgatcaagtgtctgttttagaaagttctgtctgatggactgggtgcagggagtaaaacgggaggcaggaactgattttggaggctcttgcactaatgtaaagacagtgaaggcaatagacatggcacggatggagtgacggaagcctctccagggtgtggctgagggcgccattcctttatgatttctcaggctatggatgtgaattttcctaagccaggtctgctcactcacagcagggcccagctgcatggaggaatatagaatccagggtattatcattagaattaagctgcttcgttgagtccataaatgtcacactcgggcataccagcatgtctttttttctggcttacaatgtaaaaagtaacaatggttatctgtgggtagtgggattatgaattgtttttatattattccttttgcctgtgtctattttctaagtgttctacaaagaacatattttgtatacggaaaaatttattataaaaatgtttttttaaaaaaacaaaactatacatagtttcgatccaaacagcatcctctctccttactgcctgagtaaggaaatgcttgattgaattagaaatgggaggggaggttgttgataggatccaacttcaaacttctaagctatttattttcttccttttgctttggagattgtgctgtgccaatgaagatagactgaagacgtgaatagtcttgagtttgaaaaataatcgtcgtttttattgttacagcttcaggcatggattatttccatcatttatatttcaggaaacctcaagtacagcaaaattgcccaatagttagagaagatcggattattgatactctctttttaaagaaaataaaatatcttatcagagagaagtccaagtgacaataatatcaccatacgtctacagggttgcaaaagtaaggagttgaaaggaagctctggtttaagtacgtgatgtttaagagaactgcagacaggggtctaacagctgagatttttcagcaccatgttctaaagcactttcttgctgggcctaaatcaaatgtttgtctatataatgtcttagacattgtatgcatcatcgggccatcttcctaaaaggtggcattttgattacaatcttcaatttggatttttaaaaatttgtaataccagtaatgataaatagtgcacatagttgtatggttcataaagtgttctaacatttaatctttacaactctaagtgtttgagttcactttagtccattttagagatgaagaaggtaaggctcatagaagcttactgactggcctgagatcacacagctaggaagtagagagagaggattcagatcaagctcttcggacttgaataggaatgccctttacactgctcccttctaatgacaggttttagttacagatgcctctttacccaccatggggttacttcccagtgaacccactggaagctgaaaatatcctaagtggaaaactgacattttttaaaacataatgggatgtgaaaacacaaaatacaatatccaaaaaatgctggcaacacagtacactgtacagtatcggttgtttacccttgtgatcgagtggttgactgggagctgtggttcactgttgctgtccagcaccacaagagtatcatatcacaaattgctagcctcagaaaaggtcaaaattcgacgtacaatttttactgaatgcatatagctttcacatcatcataaagtcaaaaaattgttaagccaaactatcttaagtcagggactgtctgccttttattttcattagactcactaatcaaaaaggcaagcagggcccataggaattatatccattcctgttgctgttgtaacaaattacccacaaatctggtgccttggggtaacacaaattggttctcttacagttctggaggttagaagtccaaaatgagtcttacagggctgaagtcaagatacaagcagcgctggttccttcgggaggctccattgcacagtcagtggctgccagtcttccttggcttgtggccacatcattccaatctctgcttccattatcacagtaccttcccctctcctttagtcaaatctccctgtgcctctgtcttgtaaagacacttatatttagggcctaccctgataatccaggacaatctccccatctcaagatcattaacaatatctgcaaggcctttgtggacatataatgaagcattcacaggatccagggatcaggatgtagatattttggggggccgttactcagcttaccatggcaatattcgtttcattcatttatttagttattatttagttatttttgtagagacgcagtgtcactatgttgcccaggctggtctcaatctcctggcctcaagtgatccatctactcagcctcccaaatagcagggacttcaggcacaagccactacacccagctttatttcatttattaagtggtccctaaatgtaagattccctgaatttaaatttaggccatagctcttcacagttttctattttaacctttcacttttgtgtgccttgaggccttagtatttgtttgcttgcttgctggctggcttttaagcaaatttaactctgactttctattgaaaataactcacccaaaacccctcctcctgctctctgtcagggatggatgcagaccactgactttttccaggccaggcttggaaagggcttacagagaggtgcattctttattgttcggcctctcctaactactgccatttattgagcacttaatatgtgtcagaaactttgaaatcattctacatttatttacagctcatttgtaccttggaacaggcctgtaaggtagattattatccccattttaccaatgagaaaatcaaggctcaaagagttaagtaacattcccagggttacacagttaagccacagaccctccaaaacccagcctcttaataccatgcttttgcaaaattaaataattcccaaacctgcgtaatgtatagatctcttttaaagggcaaatacaagctcacaaacacccaaggttgagttataaggattttcattatcatattatttaaatatgtgcaaagataaccagatatgaactccttatgcttatagctctcttaagatgataaaaacaaaatagtgatactaataataacacaaataaaactgcaaacactttaaatgctaattaagaacattgctttaatgtgatgggtgatgctgttttgctgaaattaaatgactgctcacaatctcgatgcaatgctgaccctcgtagcctgggtccttccgagtttggtatgcatacaccagggccctttgggctaactcagttctcccactgttcttccaaccactgacaacacattgttcaggcagcagcacacgtatcctttgggctttacctagtcaaaatgtctttgatttgttaactctgctttccttttagaacccactctctttagcagctgggttctctgggaaggagacctgcatcaagattagagtgcaggaagttaccaaagaatgttcttgggaaccacagctgtgggaggcaggggaaggaagcaggatgtgcagagggagaagttgagctgtgtcgcaggcccaacaaagacctctaccaaccaactcactgggctgggtggctcttcagagttgtcctgccttggggacaagagcactgacctttgtgcccctggaggatcactggatgagggtcaccctggaaggaagtttgacctcacattaggctgtgttatctagccaatgccaaagaactgacagctaagagcaaccttttaccatcatccctgcagctgggaagtaagtccttcactcctgaagagagatctggacagagcgtcacattgtcttccacactaacgcacaataaagttgtatagggcaaccgtgagatgtgaaaacaaatgcatcccagccactgaactgcctggtgatgcttgactagatctttgagatgatccttaatatgtacacaatctattattttattctcacaaaaatataaatataaatgtttaaattcccacagagaactaagaagactctaacaacatatttacaggcccctagaggtcttcagaacctactccaagaaagaggaaggttaggaagcttccaccccagttacctctgctgggaattgctgcatatacctgtgatatctccgtggtgtgacaatcacaaagttttacgaatacttctttgggtggcagtaatcatgatggacagatcctctcacaattcacatgtaatatttgggaataaaaacttgattgaacattcattcaacatatttgatcaggcacatactatgacgtgggtactttgctagacacctggtggggaagatacctttatacgagtgaacaaataatcatggacaaagaggatctgagagtcttgggtcatcagtaagccttttcagaagaggagtggcttgaggggacaagggcaggagcattccagacagaaggatccaatgcaaaagcatgagcctttggtgcgtgggcatgacaggtgatgtaggagatttggtcaaaaggtgggtcaggcagtagtgagaggtcgcactgacagaagcggagtggagagcctgccagtatgattaagtcatcagaggcacccccttcattactattcacctggccctgactgataccgtctcatttaacctccatgcactgtgattaacccagtagggaacaagctccacaagggcagtctgtctggtctactgccctgtgacgggagcccagcacagtgtccgacccagaaaggagctcattaacatgtgttttacagacaaagagtcaggttcagagaggacagcactttccccaaacttgcgcagcatataagtgaccaagccaagagctgaaccctcggtctgcctattccaccataccgctcttcaattcctgctccgtgagccacgaaaataactaaaagagcgttttcacagtcagagaaacttctgttaccatgggaaacctggaagagaggccagcctgtgtgtgtgtgtctgtctgtctgtctgtgtgtccgtgtgtgtgtgtgtgtgtgtgtgtgtgtgtgtgtgtgttctcaaattcctagaacggacaccctttagtgtctgccacaacacaaaatttctcctgtcatctcccaagtctctccccaaacctcaaatatgtggggtactcgagaatgaaaagggttaacctttcacagcttaggagagctgttactttgcatttaaatagccgcatttaagaaagcagcattcccaggatccttatttgatactaatgtgctgaacaccttaaagcacacttacttctcccccattcgggtcacttggagcttcattacttaataatttgaaagctttttatggaaatcagttgataaagggagatgatgaagtgaaatgttattacatttaaagacccagcaaactaggctgccagaataacacctgcgtcagacatttctaagtaaagaaagagaaggagaaggagatattggtgtgtggatgaattctcatttcttttgaaactgccgttactttaaagatactccttgcctaacaaagcctaacactctttaaaattgtcaagtgaagaactcatcagctatcttatgaattctacccctgccatggcgctctgtccccctgcccaccttcccagccgctgccttggcttcaagcccattgggtctagaggtccgccctactctcctccacaggcagggtcagcctcacacagtgcccacctcaaaagccttcatgactaaccagttgagaaaaccctgggaaacaggcttggatgcgaccttttctttttactttccatttttctttctctctctctttccttccttccttccttccttcattttttcgtggtggtggtgagacagggtctcactctgtcacccagactagggtgcagtggcacaatcacagctcactgcagccttgacttcctgagctcaagcgatcctcccacctcagcctcctgagtagctgagtagctgggactacaggcatgtgccaccacacccagctaatttattttttatgttttatttgtattatttgtagagatgaagtctcactctgttgcccaggctggtctcgaattcttggattcaagcagtcttcttgccttagccttccaaagtgctgggattacaggcatgagccactgtgcccagccgccactttttttcttttttttctttttttttttttatttgagatggagtctcactctgtcacccaggcttgagagcagtggcatgatcacagctcactgcaaccttcacctcccaggttcaagcaattctcctgcctcagcctccggagtagctgggactacaggcgcatgccaccacgcctggctaattttttgtatttttagtagagacagggttttaccgtgttagccaggatggtctcgatctcctgaccgcgtgatccacctgccttggcctcccaaagtgctgggattacaggtgtaagccaccacacctggccccagcctccatttttttaatggcaatatattcacatggtttgaaaatcaaaagatatataataaggttacacagtgacaatcctcagccttttgcttgctccctggttacctagttcccttctcctgaggcaactgatttttgtaatgttcttatatatccttccagagatactttatgcaactagaaatatatacacacacaattttctttatccttaccacccctctccacaaaggtaaatagattacacaaatagattactatacaaactgtactgtagtttgcttttaacatttaatatatcttacagatactcttacttgtgacatgacttttttaatggtgaatccaaagactatacagcaatgtctaaaaaaaaaagattcaaaagtatatacgtgtgtgtgtgtgtgagttttgtgcataagttatgatgtcaactatgacaaacaaatgaatattgcaattgatgaaagctgctgggtaaggatggtgggattatagggtcattctttttgtttctctctcctcctacgccgtgtgtgtgtgtgtgtgtttgtctctgtgtgtgtggccaaaacatggttatgtttttaaattctaaagaccttatttcagtatgtgaggtatattttcattttggtagagttctttcctggccctttcatatgcatcagcatctgtttcttaaaatacttgagtcactttattggtgaaggcttcctccaccactctaaaattgcagcataactctctcaccccatcctggccctccccctcacccttcccggctatattttccccggagagctaatcagcactggacacactgtgtagctgttatgtctgcctcctcctccggaatgtaagctccttgaggacaaggatgggtgtgtcttctgttcagggctcattctccagcacgtggaataggcctggcacagactaggggctccatctatcattgctggatgaatgagtcctcaccatcagccccagcaacccaacccacatgctctctggctcatgcctgtaaccactaaccagagcacctgcagataaccagtaaccagagcatctgcagctctgtcctctgcttcccttttccctccccactctggcaactctggaagaccactcctccctcccaggtctggatctcaccttagggatccattcctgcaagtgcaccctccctctctcctgcaatatgagcttatcttctatattggattatacacttggacatacaaacttgccctcatatcacacatctttcaaaaaataatcacatgtccttcctgctactgccatttttctcaactccacagccgacttctcaaaaagcgctgtctgggcttgctggttccgctaattcacctctgtctttcctgaacctgcttccattgtattttcagtagtggccagtggggcagcggcggcagcagtgagcacatggcagggggggcagtagggcagcagtaaacagaggccgcagaggtagtggggtaagcacagggtttctgaagaggccctgggcaggtcctggtgtcctcctatctctctggccattataccttagtctgctttgctctcccccatcctctcctctgcctccattcactccccaggtaatctatcctgtggttttaactaccagtctctatgctgatgacttggagtttacgtctccagcctggacttctccgttgagctccggcctcatatatctaccttcctacatgacacctccttttggagtcatccttgacccctctttgttttatacctcacatccaatccatcagcagataacgctgagccgacctgtaaaatatatctgcatcccatgccttgaaccccttccattgctcttccctggccctatgtcgccagacacagcaatggcctcctgcctggggtccttgctccccagcttgccccactccagttactttccctgagcagccagcaggatcctttaaaaatatgaatcaggtcataccactcttctgctcacaaacccctcagccatgttccagtcccatcacactctgaacaacagcccctaaaccctctgggagggcagccaaggccagagacttcctctagcttattattaactaattgtttaattaactaattcattatttatcccttaaatattccctgcatacctctcacaagccaggctggtgctgaggatatagaagggatgcaatgcggcccctgctctaatgctggcttctgggacgggacctgccctgggatggcagtggggatgggaatcatggttgaggagtgtccaacactgtttctttttctttttttttttttttttttttgagatggagttctgccctcgtcgcccagtctggagtgcaatggtacaatctcagctcactgcgacctctgcctcctgagttcaagcaattcccctgcctcagcctcccaagtagctgggattacaggtgcccgccaccatgcccagctaatttttgtacttttagagatggggtttcaccatgttggccaggctggtctcaaactcctgacctcaggtgatccatcaaccttggcctcccaaagtgctgggattacagtgtgagccaaagcacccgacccccagtgctgtttcttgaagactacaggatgtgttcccatggggtagggttaggggtgctgaaaggggcactacccttacaggttgaggcacctccagtcagatctggcctggatcatgggctgggcttcctcacagccctttctgtttgaaggcagacagcccttgcttgatgttctctcctgtttggatttggcatcacctacgtgatgttcgaataccttctgctgtggcccccttttcccttctttgctctggccttggcactaaggtttttctgactgctgaaggtcaggtagaagatggggaggcggaccacggaagagcaggtcctgggggctggtgggatgggaggcaggcatgccccatcagcctcttctgctcctttgctcactgattttactcaggggagcagcagacttgtgtgagcactaaaaagaacataataaaaatgcagaaaatgaggttaaatccaggatggtacttcagttaccaaaggacaagctaagtaaatgccgatggccagtgccagcacacagaaggtcatagggtgatgtgagtcctcagagctcccacccaccggaggcagcccttgggcggaggggcagtggggcaggcccggaacagctctgatggtcccttcctctctggcttcagaaatgccaagctgcttccacaaaaccatctcaggggaaaatcattatctacggacattatgcaattttcccatcgaaattacaagctgtgtttgaaaagaaataaaaagaaattgaatttgaaatgcttctgtgcaaacgcatcatcttctagtggatctgctaatgggcttcagatactttctcttgctctaaaatagttgatcagacagcagcttgtgatggtggctgcttcccggggaacggggcatagaatgagcacttatgaacggccagccagcccacctgagccaggttcagaacctgtgagctctgaccacggttcccaaagtggtcactgtatgctgtcccttcccctcctctacctggcagtgctggcacggctctatgctgggactctcactgctcctccagcgcctccagctgacacccaggtcgatgagtgtcacttcacactgcgctggctccatcctaggtccagggagtgcccacggactgggcctcggaggacaccagccccttcctcatcacagcctctcattcacccaacaagtattagttaagcgtgttcccaacacagatctaaacactgatagtacagcagtgagcaaaacagacaaacaccctcgccctcttggagcttccattctagcagggggagatagacaataaaaagtaaataaggcaggacatggtggctcacgcctgtaatcccaacactttgggaggctgaggcaagcagatggcttgagcccaggagtgtgaggccagcctgagcaacaaagcaagaccccatctctacaactaattttaaaactaactgggcatggtggtaggcacctgtagtcccagctatttggtatgctgagggtagaaggatggcttgagcccaggaggtcattctacagtgagccatgattatgcccctgtactccagcctaggcaacagagaaagaccctgcctcaaaaaaaaaaaaaaaaaaaaaaaaaaaaagtaagcaaaatgcacagtcaactggacaatggcaaatgttatgaagaaaagatagtgggataaaggaatagggatgctgagtcaaaaagggggcagggacctgccatggacatcaaagtcctcactgagaagttgacatttgagcaaagacctggaggaaacaaaggagagagtgctctggtatctgggagaacagcattccaggcacagggaacagcaagtgcaaggtgtgcctggcatgtttaaagatacataagaagtccaggatgccgaaacccaggttgtggaagagtagtaagagatgaggctcaggaggacaggcagaccatggagggtgtgggggaccagagcaaggtcctgtctgctgtgagatgcaaagccactggaggattttggccagaggaatggcatgatatgactgctgcacgaacaagagtctggaggaagggaggggaggtagagagacctgctaggaagcaactgcactcatctagctgagcgatgatggtggcttggatcaggatggaggcaggcaggagacggaaagtggttggatcatgaagatattttggaagtggagttgacagggtgtgccgatggatcagttgcagggtgggagagaaagaggcatccagggtggatggaactgaaagtacggcattgccatgtaatgggatgggaagaatgaaggaggctgggcttagggaggggaagatcaggagtttggtttcaggcacgttgttgagtttgagatgccacttagatacccagatgaaaatgttgagtggctgatatgcaagtctagagtcagaggctagtttgcaatagaagattacagcttaggaatcatcagcatatacacagttggctttttaaggcaggggactaaatgaaatcaccaagggagtgtggataaaagagaagaccaaaggcttgagccctggggcacttcaagctttagaggaaagtgaataggagtcagcgagggagactgagaaggaagagttgatgaagtggaaagaaaatcagaggcagcaagtcccagagccaaggagaaagcttttcaaggcagagggagtgagtgaccagctgtgtcaaatactgctgaggggtcacaagagctgagagctgggcactgactttggctttggcacggagaggtcactggtgaccttgacgggagcagtgagtctgctgtcagaggagaggtgagtctcagttgcctcacctgagaaatggggacaccctcctgccttcctcagagagcagcagtgcagaccatgggcaaactgcaaagtgccaccaaatatgagctgttttatttatgacctgagaagcccagaggctgttgaaatgaggggaggctactgttgggcacaattggttttaaagatgcttacagccccgttatcacctcataaaatggctcatttcttgctactcatcaccagaacactcacccaggcatgaaaaagttaccttcagaggtagaagctgtcaggatggatattttttgtgcatggcaactgggaaagagaaaaagcaaataatggggccaaatagtgctcaccggggtctccacgcaagattccagacactgctctcccagagggaaccccagtgatcctgtgcctcaaagcaagggctccttggagaaagccaccaaccagggtcagctgtgctctcactgcaaaatgagcaacatgggggagggaggagagaaggatggagaagaaggacagtcagggaaagtggaaagaatgtgagtttggagtcagatacacatgcgttggaatcgtggttcctgtgtggtcagcaaatgacctgactcctctgagccacagcttcctcatctgcagtggacagcgtgatagctatttccaaagctttctgtaagaaacaagctgttgaatgggggaatgcacactgtgtgtgtggctgcgtatcactgcatttgcaattagtggcactgggttttcccctgtttagtagcagacagtttttcttcagcccaaggagcctgtgccttcccggcttcatcaaaccggtcgtcagaacagcagtaactttcagtgttgtgaacatggtctgatattcttccacgtgtggctgtgatatgcagaactgaaagtaggctaggacatgcccttaagagcagcagaagtaggaggggtgggcctggttctcctgggccacagtgtgcactttcaggccccatctgcctgggttcatggtggcaacgggtgtggcctctagaatcagactgaggtctaaactctagctcagccagttaactaactgtgaaactaatttggccaaataaatgtgtttctgaggattaaaacgtatatatccaccttgcaaatgtgttgtaaggattaaatcagatgctgtctattaggcaatttgcaaggttagcaagatgcttagcacataaaaaataaataattattgttttattattgttgctgtttccacctgtttctattcctttccctctctgatcatggattgcatcccatttctcttcctgtggggaggagagatggtaggggcatcaggcaagttggccaggctgactccacactgaggtctgagcctcagtgctaccagcagcaaaggaatgtttaggatgaggaaatggcttgtggttcaggactggaagacaaagtcaaaaagttaggaagaaaggggcagggggatgtgacagactctggccttctgctgtgggcacagctgggatgtgtggagctcttcctcattgggtggctggctctggagtgcagaggagggtcagcgtggggtaagattggttcagacaccagccccgaccctagactcacagtcttactttctgttctgctcagaccaccctgtttatctcctggtattgatgtaattgctgcctccagaacagatctgtcccagatctgttttcattccacatgaacccgcttccctccagacctgacctcagcccatggcctgttaggggatatgctcttcccatttggtaccagtaactgtgaggtacaagtacagctgttgtatccccacaatatgcttacaaaagcaaaatggaagatgaatatgagtgacctgtagtatctttgggttttttcctattttaattggtatgtctttagaaaagtgttggcatcatccaaatgaaccatgaacgatggatgccctgagacactttgtttgaaaagggtcctgtgggagctgagaaggggctctaagtattcttgaaagttcctgtctgtgccttagagacttgttaaaataagcttttcatttaagtctgaagtgtgggttgcttactctgaatttaagtccttcattcttcagaatgtgaaatgcccagggccctagtgcccccatccaagctacataagccttccatcatatgctccctgggactcagagcttggctttcaatggaggcaagttctcctgaggctttgtgggtttgtacctgcaactgtgtgctccagtctctgtactcaggcagcgcaagtcaattctgatatgaacttaccctgaatgtaagtaaaaataagaatgatcagtaatttttgtggagcacctgctatgtgccaggcacttcattgccacattacatgagttgtcatttagtccccctaacaagcacatgcagaagatcctctttttaccctatttcacagatgagaaaactaagagaggtcacaagacttgccaaaaaacagagtttggcagggcacggtggctcacacctgtaatcccagcactttgggaggccgaggcgggcagatcacttgagctcaggagtttaagaccaacatgggcaatgtggcgaaaccccatctctacaaaaatacaaaaattagccatgagtagtggtgcacacctgtagtcctagctactcaggaggctgaggtgggaggattgcttgagcccgggaggctgagcctgcagtgagctgagatcgtgccactgcactacaacctgggtgacaaagtgagaccctgtctcaaaaacaaaacaaaaacacagagctagtaaatggtaccattagcatatgacctcaggtatgattccagagcttatgcttctcaactatgctactttcctgcctgctggattcataaacattaaaaagatggatagtatcccgtgtgccctaaattgagaacatgggcacatacacatccttgctgggagtagaaattagtacagacatttggagggcaatttggtagggcagaccacagttttaaatttgcttcacattttgatcactcctatgactcaatgatacaggaatccttggatgtatgagcaaataaatacgtacatgagtcttcatcacagcatcatttatgaaaacaactaaatatttactaatggtgccagtggaatcaattagagaacatcccctgctacataactctctgcatacatcaaagagaatggtgtggctttgctttttcaacaatctactgagcggccgtaggcatggtgatatggccatgaatgagcaagattctctctgatccttatagaagttaagttctaccagataacttgctgcttcaacaaaaatatttagctttttaaataaatgtggtagaatgctcctgctttcttgtttcatttaactcaaatgatcaccaaaaaagagaacaataagctgttgaccctgcagatgttgtgtaaccactagatgaaaagatttacagcaggaagctgtcatgcccacacatatggtcccaccatccttggagcctccataggtctaaatggagtttcatcaccataaataaatggtaatgtaggttccaaactatacttgtggagttatacatttgatcttggccaaaaggccaagaagcaatattgtgtgtgtgtgtgtgtgtgtgtgtgtgtgtgtgtgtgtgtgtgtgtagttatatattacaaaagcaaaatcactatatcagctgggacctgtaaaccagaatttaactgtaaagcaaggtgaatctgcatggccagctaacttggcagccaccttcactccacccacattgattttattttctagtgaaatatttcttcaagagcaaacagactgtcatcagacagtatctcattaccaggatctgatatcttggatttcctttttctaagtcttgacctggcttgccataatttgaagatatccaacactttaaaaatcaaaaaagagagctaagatatatagtatatagtgtacatagtatgtagtacgtactgatggaaagtttcccgtgatatgatattaaggaaatattttaaagtcatggtacagaacaagatattcagtatgacacagatttggtgggaaagctaaatataatgcctgcacacacacacacacatccttacatgtgcatcgtagaagatctggaaagatacacaccatgctgtaatattctggaaacggagaaggagacagaaggcagggttgctgttgaagtagactgtgttcaacatttacattgtgagtttctgtgatgctaaaattttccacaatgtgtgtattattctggaattaaaaatcaaagaaaaaaaagtggagcagaactagatgatgaggaccccataagcaaaactcaggaagtaagaaattgtcatggaagttgtgaggagcctttgaagggttttggcaggagacagataccgtcagatttgcagcaagtggaggatgaattgggggaagcaagaagatactggagatggggtggccagaggggagactgtggaaggaggtgaacacaggaatcctcagcctgactggtgtcgggggtgaagggagctgctggtgtttggcacccggctcaggcacgcctgagctgtgccttcaacccaggctgggctgctggaggaggagcaggactctgaggtcagaggaagggctcagccatgaggcatatgagatgactggaggaaaaccaggtctggggagacatggagctggcactcaggagacagataggttgtgttccatatatgacttcaagataaacaacttctcggtcattcaacagatatttcttaggagggaagaagggatacactgtaaacaaataaatatatttctcagagcatgagaaatgtaactgctctgttgggaaatgctttgcctgcagacatgtgaatgttggggtgtctgtgcatcccaagatttttttcatctgatggaaagagggtaccccggggagcctgagcctaggaggaggctgcaagcttcctgggtggctcaccgccgctgccctgtccttgtgggcccttcccctcacccaggactgtctgtaggagcccagaccacgctgggtctggctaagccaacttcctctgcaccaccaccacccagcagccccttcctgcatggtaaatgggaagccatggaccagaaagctttttataacctctgggcctgagcctcagagacaccactgtcctccttcctttcagtttccatggggctgtgggattttctaggcaaggtacccaaccagggagaaggtcacaatgcattctaactgcattctaggcgcctgctgccaggcacgactctaaggactgtagccttgtcgctatgagccagccaagcaagtctcttcccctggaactcagggatctgttcagttggcaacaaagcccttccttccccagctggtgacattctggagttttccacacacaatggactattgtgtctgagcactgctgggcccaggccagggaaaggggccatacaggaccagctgactccactctagggaaagccccccaccagagctgaacttggacctgtggaggcctccagccttgcaaagatcatggcacccctcacccgcagtgtgtaattgaaaataaaaacccaaccaaacctcaaagttgagcaaaatcaacaaagttctgatttttgccctatgaagaccattcagtgctttccttcaaaatgttaattatcaaattattcctcaaaaaattactttagtttccccagttatccctaaaataactttatggtgctttattcaccatccaaagcaaaacagagccagagaacctgaggggcaccacgggtatggggccttggctttgtgctggcctcctcgtccaagggagtctgatccagcgcatgggtctcaccagcaggacaggcgttgaggggacagtcctcagggccaggtgttagccacattgcaactcctgctgacccagctggcctggagcaggccccactcagttgctggacacagagcatggctctgccctctgaaatggacatgacatgggagtctggccaaccaaggcagaatccaggccagatctctgctctagtggggaagggatgggctgagctggaaaccaaaggtgtgactcagtggcccttcagtgtccaggacatacctggacactcagtcccctctcccggtatcactgaggccccagggttcccccatcccagagagaggtggctgtacacccaggcaggaaaagccccaacagcaggtgagggagtgggggtgaatggtgtcaccaggtcaaagccctattgttcccatgagcccagctctgttcactaaatatttgtggtccttttttgcagagtgatgaggtcctcaccgtcatcaaagccaaagcccaatggccagcctggcagcctctcaacgtgtaagtaacacaagtcccttgcctggcctgtcttatcctagccccttctcaaagccacctacctaatggccaccacataccagttatgctgttgaagttagcactacttctcagttaacaagcaggcaagatgctttctatgtgcagagcatcacacctgccccatcttctcaaggatgcaggctcaggctctgttttcccccaatggctttaataccacagccagatgtgatggctttaataccaactcagatgggatgattaactgttctgtgttcactcatgctctcagccacaacagaccaaacatgccctcaccctcagagcacacaggtgtactcatgcttagccagtctgatgtgtggaaagccagatttaccctgggttccattctcagtcccgtttcttttctgtctcctctatcccagagagattttatctgcccttgagtcaggtgaccaagggtatgctgacagtccccaaaactacctcctgccaaatggatggatacagtggtatatccgtcaggtttttggacagctctccatggatggtccacctggaccttaaactcatcatgtccaaaatgggtcccatcaccttcaaacaaacctgctgttctccatgtggagaaatattgaaagtacagtgagtgtcaaaaccctgtggattctgccttctgggcagctcacaaatcagtccttacttgattctcctccccttccttcaagccatcaccctttctcacctggaccacgtcacctttttcctttgctgtagtctccctcagtccaattcctcatccacagttactagagtgatcttttaagaatccaaataccggccaggcgcagtggcttacgctgtaatctcagcattttaggaagccaaggcgggcagatcacgaggtcaggagatcgagaccatgctggccaacatggtgaaactcagtctctactaaaaatacaaaaattagctgggtgtggtggcacgtgtctgtaatcccagctatttgggaggctgaggcaggagaatcacttgaaccaggtaatcagaggttgcagtgagctgagatcgcaccactgcactccagcctggtgacagagcaagaatccatctcaaaaaaaaaaaaaaagaatccaaatcctccagctagcctgggcaacatggcaaaaccctgcttctactaaaaatacaaaaatctaactgggtgtggtggcgcatgcctgtagtcccacctactcaggaggctgaagtaggagcatcgcccgggtccagggagtcaagcagcagtgagccgtgatcgcaccactgcactccagcctaggtgatgggaataagactctgtctcaacaacaacaaaaaagaatccaaatctgttgtgtcctctccttcttcatccctctgtgacttcgcttagtctcaagatcaagtccacactccttagtttagcgtgcgcaggtgggcggaacacacgtcggggttcatctcttgtcctccccatgctgcacctcatacaggccaccccgaatcctgggcagttccttgaacaagctttgattttgctcatcctttaaagacgcaaggcctggagactgaccccaagaagatggtttacgaagaagccttggccagcccctctagggagtagtctacatccattaacacccgtattgaagacagcaacaatgtgaggaatgtgtgagatgctgctcagtgggagaaaaggcgaaatccacaggataggaagggaggaaagtgctggacattcaaaaggaagacgccccaggatagggcagtgggagtgagggaggaggcacactcatagctgactgcctgggagcagggaagctacggcgaggcacctgatacctgctcatttaaccattcagcaaactaatggctcatcccctactgtgcgccagccctgcacatgcagtcctagctctctggaacactcagccagagaggagacagacaacagaccaagttgggccactccaggttttccctttgcacaagtccaggcagcaccatataacctgaatatataaaatataatgtcatcatggcagccttgtatactccaaggggataaatgttagggtgaggaatggctctggagccccagagcaggggcagaaccctctcctgctgtgtggaggagggacatggggctgtgcctggaaggtgttccttgtgctggtcaggactggcccaggcttgggtggagctgaggctctgagtggaggcctgaggagggaaagagagactagcactcagacagctggcccagcgcagcccagctggctgcatggaggccttttctagcctgctgtgagctctaagccttgctctggatcctccctaaggaagctcacaccagggcaggagaaaacccacccagcccaggaaatgccttgccctccaaggagaagcaacacgaggcagggcctacccagggcactctcctggcaggtgcacctttgcccatctcatccctgtcctaccaaaaaacaaggatgtgaattcacaaaagcccttggtgccctttgcataattaacatcagttaccagtcaggtcaccctgaatctccttactctgctgtctcttcagattctcccagttccttggctcccagaacctatgtgtgaagaacccctcacttctggtcctctaagtgggcaggggatgaaaggcaggtaggggtggggagagtttgtgggtaccaatttttacaccattaaggagtctttataccagttttctcttgaggagcctgggcttaaacagatgtaaactgcaaatcaaagcacattcaggaaagagataggaagggagggagagaggaaagagagagcagtcctttttaccttcagcatccccttgggtccaagtaggcgctgacatttattatcccttttaatcctaataaccatgaggtaggtattgcaatgtccattttaccaatgaccaaactgagactcagaggtcctatgacagcaagggtggatatagaatgccaacagtacccagctgattctaatgcctgtgcttttcactataacacgatccttccaattaagtaacaattcattcattttcccatgtctaaattaatcaagacatatatacctgccaatgagccttctgattggcatgaaattaacaatgtgaccacaccaaatggtctcacacctaccccaaaacaaacaaaatcttactttcacttaccctgtatcctatcaaggaggactgaaacatccttgataggagggtccccccaaaaaaagtcctgtgaaaggtgcttagggcaactgtggtgagcacagcacagttccttatggagattacaattcagtggggagagatatttactaaatgatcacacaaataaatgtgacatgtctatgaaggaaaggcataaagtgccattaggggggttagagatagcttccccctaaaaaggcaatgaagctaagatctaaggaagcagtaggagttaactaagcaaagaagaaaacaaaggggagaacattttagaaaatctggagagaccatcatgtatctgcaaaggccctgtatgaggagggagtagagtatgtctaaggcactaaaaggctttggtctaactagatccagaaatcaaagatgagtttggtgtggggccaagccatgtaacatttgaaattttttatttgaatttttgcattaaaagtcatgagtaagaccaggtgtactggctcacacctgtaatcttaacattttgggaggtggaagcaggaggctcactcgagcccaggagtttgagaacagcctgggcaacaaagcaagacccccatctctacaaaaaattttaaaaactagccaggcgtggtggcttgtgcctgtggtctcagctacctgggaggctgaggcaggaggatcactttagccgaggaggctgaggctgcagtgaaccatgcactccagtctgggtgacagagcgagaccctgtctcaaataataatggtaaatcattgaagggttttaagcaaaagggtgacatgatcatatttgcattaaaaaataaaaagcaataacagcactcggcccctgtgtgaaagggtagatgcgggagcccagtgaggggggctacttcagaaaaccggagagaattaactgtgacttcactaggatggtggtggtggtggaaaaggagagaggtacagagatgtgtgaggcacgtaggaggtaaaatcaacaggctgtggcgataggtggagtaagggggtggagaaagagcagtcaagatgtttcccatgtgtctggctggcataatgaaagagtggtgaagccactcacaaggctgaaaacgttagatgaagttcagtgggaaagatcatgggatcagttctaagtgtaagttgttaagatgtattcaagatttccagttagaggtgttaagtacatggttggctagatagctctggaactcagggcaagaattctgcactgagatctaaaattgggagccctcaaggaatgggagacaatgccaagggcataagaataggaatcaagggcttaggactgagttccaaagatctctactattgaatgttgaggaatcttgcctgcaaaggacacagcaaaggagcagcaaagaaattggtaaggaagcttggtaccgagaaagccaggggaagaaagtgtttgaggcgggtggttggctgtgcccagtgcagccgagaaaacaagaaagatcaaggctacaggaagccctttgggtttatcgacaggaaggtcatcagtgaccttacggagaatcctttctgctgagtgatgagggggaaaaacagcccggagcaggtgagctgtgaacagagcatgaggttatggagtcagcaagtacagaccactcttctgtgaagtttgctatgaaagaagagaacctggctccaaggggatgaaagagtcaaaggagcattttttttttcttttttaagatgggagagactttctgaaaaactgaaatgaatattttgggacaccttcccacatttcacctacccctcagacttcctgaggcctccgtggaacaaaattaattgatggcaaacactcagacctcccaaacacccaaaacctctgcactcggcgctactggcttgttaagggaaaagaattttcctttgattttcccataccccagtctcccctttcctcttccaaatctcattaggaagtcaaattaggaagcctacatgcagccaagttttgttttgcagaaacagccttgcctctctttgctgagcctgcctgattgaggttaatgggattccagcctccctcgccgcccagtggaaagccagggtgacctactttgcaaggtcctgcccgttgaaactgacttgtttttcaatgatctgcatctttatccccaggaccacttctcaaaggacagccatgaatgagcaaattagctgctgacttgtttagctcaataaatcaagctgtggctccgacagcccagggtgcaggtagagacaggaaaggcagactctgaacaaaacccacatcctttcctagttcctccggtgcctaagtagaaaatgcccagatttcctacaaatcaattctgaatgtccatcatccagttcctccaattgcatctgaatgctaagaattactgggacttttacaaataacttttatttccttccttaaaatgaatcctgcaaaccactgtcaccaccttaaattattcccagccactctgccggattaacattgattagataaaggtcgtgtttgtgaggccagtggagtagagacatggtcaccttctccagaaatccaaagccatgctccccaggaggccagagatttcccttaaattgggccggaagagtcagggctctccctgcctcctgcaacacctgcacaggtccaccgatgtcctcgggatgctaaaggaagatgggctttggacagagaagcaggtggtaggtctaagcatccagatggacctggagtcctagatgcctcctggttataaacacagcgttttccaacgttgcaggaacctccctcaaacctttctccacacacacccctgcagaacttcagcctagtgaatggcttgggcgccctctcgtggccaaattgagtttttgcaactctgaaaattcagattattgaaaactcaggatgagagacaacacagcatatgagtgttttaggaaaccctcctgagtctcactggtgtggatctgtaatttaggaggggatggtaagtctctagaagcagtatcaaaatcctttcttacctcttttcttttatggtgttttggaacattttgtttggaaaagttgaatgagaagaaaatcaacctctaccaagccctgttatgtgtccctcacaatgataagcagttttctcacaataaaaccttggggtaggatgatgatgctcccatttggcagatgtagtaattgcaaagaaaggtgaggtggaagccctcatcacatagctattaaataaacagctgattcgaatccagctctgactgtcaccaatgccctgggttctttcctccacaccatgctgcctctccaaatgtagaaaaaggaaacatttctctgggtcttcatatctgatgtgaattgtctgttcataacttttctttatctagtgggatcattgtctttttctacatatttggattaactctgtagataatatagatattaacactttgtcagtcacactcaatggagacattttttgccagcatgtcatttttctctccaattcagtactgctgttttcattttacagaaggtcttcgttgatagataattcaattcttttctttataattgcttttattgtttcaaagttgaaaaaattaatatttctctagtagatctgaaagctttatttttttctatgatctggttattttctatttgactctgggtctgttttttttttttcttgtgtggtatattaaatgtgaatccagttttttttttattacagttaacttagcccaaccccacttgtcgcacaatctttcctttccccctaatttgaaaagcctattttgtatagtccttatctatagtttctgggatctccagtctgtattgctgatttatatttctatcttacctgaatatcacgctattttgtctatcatgctttatcatatactctggtatatggtatggctagatcaactctctgctagaaaacggatacaaatctaagtcccaggtagaaagatgaaaccaaattaacaaaatatatcttggaagacatggcatatacaaaagcataaaaatttttatgacagtttgaacaaattaaagcactccagtcctatctagcattttctaaggaaaactcatatagattcttattcatttaattatttttattatagaataaatactttgaagtgatgcttaattaaatttgaaggtcaaaggaaatacaagagctccatgttcatttcttagattaagtcatttacttcaacaaacatttgaagagaatccatggcatgccaagttctaagccagacattgggatatagctatgagcacggcagaaatggtcctcactctattggaacctgatgggaaaggcagatattaacaaaaaattccaaagcaagagtgagttcagcatgctatggggaggtagaataggagttctaagcaatttggggagaggtcaggaaatacctcctccaggaaatgttacataaatggggtcaaggagggattctccagtcaaggataagagaaagctgcagggcatatctgaaaatgctatcaaattgttctcaggcccttatagattcagatttactctatcacccaagataagtcagccatgtgacctcatagtcaggaattggccgccccacgtttcccacaccttgaaacacttaccagggtctagagggtatctcgcttcagctacagatttggatacaacagattgggccaaaatgcatttactgagaatgatttccacaaggccttggtctcagatggttacacccattggctgggcaggttccagggtaatgtgttagggtggcagttggtttggtttctacagctctggattagaactggttttgtccccttagattgtcattatgaatagtcacccatggggtacaggatatgaatgactaatctggccccaaatcacctacttaggaagacaggaaggcaatagatggagcggtcagtctctatgacaatggaagaggaaacctgcctcccaggggactgctggaccaccccagaggacagctgcacccaggtgccagtgctgtctgctcagcagttactagaaggcagaccagaaccccgtcctgtgagtccctaggcgaggtaatgccacacctccatagactgcaatccttgtgtgaaccaggtctttaaagaagctgctaaaatcactgacctacatgccagaaaatgcacacgtgggaaaaggaaattaaatcccctgatttgtgcctaagtagctgatgatgtcattgcaatactttagcagtttataaagacttcctaataaagcatctcatttgatcctgacagcaacactgcaggtatgtattgctagatgaagatattgagacttgaagagggtgagcaacttgcccaagatctaaagctagaagtggaggagttcaagtcatcatacgcatatttgttcagtcggcccactggacacctaggtcctggggtacagctatgaaacacagagttccttcaaggaactcccggtctaagctggggagagggaacagtgaggaagtgattacattcatggggtctggctatggagacctgcgcagagtgggaatccagcgctatgtatctgcctcagccgaaggcaagacctgcgcagagtgtgggaatccagcgctatgtatctgcctcagccgaaggcaagacctgcgcagagtgtgggaatccagcgctatgtatctgcctcagccgaaggcaagacctgcgcagagtgtgggaatccagcgctatgtacttgcctcagccgaaggcaagacctgcgcagagtgtgggaatccagcgctatgtacttgcctcagccgaaggcaagacctgcgcagagtgtgggaatccagcgctatgtacttgcctcagccgaaggcaagacctgcgcagagtgtgggaatccaacgctatgtacttgcctcagccgaaggcaagacctgcgcagagtgtgggaatccagcgctatgtacttgcctcagctgaaggcaagacctgcgcagagtgtgggaatccagcgctatgtatctgcctcagctgaaggcaggcagaaaggctgctggaagaggtgacatgacctgaggcttgaaagatgagtgggcccagcattctcaagcttgaggtgtattacaatctggagggattattaaaacaaattgctgggtcctaccccaagtctctaattcagcaaatatagggtggggctcaagaatctgtatttctaacaagttcctagaggttgctgatgctgctggtccaaggaccacacttttccaatcactgaagagcttgcccaatagatgcaagtacaagtggaacctgcagctaacctgcaggtagactggcctgtcagggcccagggagcttcttaggtagcaggtagtgtgggataagggagggggtgcatgggaggcagcaccaggaccttgtcaatcgacggatgccaaagccaaggctcaggccaggttcttctccactcctgtggcagaacctagactggcatcaggctaaaatggaaagtccattcaggaaggcttttcctcccacctgtcccctttctgatctccatacgatcctacagtacttctctcagtaacactaatggtaataagagctctagggccaggcaatgggctaagtactgtctgcaagctagctcatttgaaattcacaggaaccctttggagtagacgtatgtgatcaccattttaaagatttggacactgagacgcagaaaggtttgataatctgcccaaggacacacagctgtaacaggtgataccagagcccaaggggcccagttccccaggccccagtcgggtctgcagtcattgctttctggtgccaggtgagggcagccagaagcagctggtcccaacagagggcacagggacttccagacagctgaggcagaccagctgccagctggactgaacagaacagttggtctctggccaaggattccccatgattagcagccttggggtgcagagtcaggccaagctgccttcaagcctcagccccctcctagctgtgtctattagttcattaaccacttattcactttcatggcctctctatgagacaggataataattctaaccccacaggattgtcatgaggggaaaatgaaataatatgggactgccacccgctgtgtgctttgcgaatgtgactctttcctttccagccactctgagtggttgctgccatgtatctcacatggtcccagccactcctgagaatctgtgtgacacaaagagagaggttgaagagcggcctctgatagcttagactcaggatgttattcccagcaactgggggtgtcggccaaaggtctctgactctacagctggtccctgcttcccagctgtgagctgatgggtacagtctggcgctggacagtgcctgctattggcagccttctgagggcaatagaaacaggaagctgggggagatgacccctctgatgggaggttgaggtgcaaggatcacttgagcccagaagtttgaggcaacagtgagccatgatcacaccactgcactccagcctgggtgacagagcaagactctgtctctgaaagaaaaacaaaaagagaaactggatagggtggtagtatatggttctctccacatttgttcaatggatgggctcaggacagagaagggtataaacccacagtggccaaaggcagaattcagtgggagaccacgaatgtggatactctctgtccctctcattcttcataatccaggcagatttccctcagagtgaggaccaacccccagaactctaatataatggtctctgtatttcgtttccaggagagcagcaccttcagctgaattttccgtggacagaacgcgccatttaatgtccttcctgaccatgatgggccctagtcccgactggaacgtaggcttatctgcagaagatctgtgcaccaaggaatgtggctgggtccagaaggtggtgcaagacctgattccctgggacgctggcaccgacagcggggtgacctatgaggtgtgtgtgtgtgcctggagtggtgagtggctccttgcctacccgcttcctgagtgtcctggacacagaggggatctgtcccaggctctgtcctaggtgaactttcagtctggctggggaggctggcatggtcgcatcatcacatatggtgtaatttgggctctgggaactgtctgtgcagtggccaggagagcacggagagggaactgctaaagagcagttcccaggtgagcaggggacagcattccaaagccatgactgcaagagcgaaggtttctggacagctgggctaaggagtttgcattctgtcctgaatgtcatatttctctgatatgatctattgcattgaaatctggagccatcagaaaaccaatgggagaacaatctagaacagacatctgcaaactatggtttggaagacaaatctgccctacaatgtgatttgtcaataaagttttcaaagccagttacactcctccaagtacatattatctgcggctgttttctcactaccacagctgagttgaatattagcaacagacacaatatggttcacaaagcctaaaatatttagcatctggccctttactaaaaaagttttccaatgccgggtctattagaaagagtttgggattcaggccaacctggctcagccgtttcctagctgggatggcctctctgaaacttggcttcttcatcttagcacaatcctaccatggacatggaagaattttaaaatatagttctagaaatttctcagcacagtatgtggcatgaacacaattccataaatataaatagtagttatgcttgttaaattcctatcaaggactttgctctgatccatataacaaatggcttttgtgggttttcccaattttatttcttactctctacctctgtatgttttcttgcagtcacccaacaaacccaccattccccaggagaaaatccggcccctgaccagcctggaccatcctcagagtcctttctatgacccagagggtgggtccatcactcaagtagccagagttgtcatcgagagaatcgcacggaaggtactgggttagaacccactctggcatcgacctttcccggtaggagtgccagggagattgtacacccttctgctctagaatcatagagtcactggcagaaagcacctcaggatatggaattcctgggcctccccaggtttctaacatgcaaattatttcataagatgaaaataagcaggccaggcactgtagcccatgcctgtaatcccagccctttgggagtccaaggtgggcagatcacccgaggtcaggaattcaagaccagcctggccaacatggtgaaaccccatctctactaaaaatacaaaaattggctgggcatggtggcagggacctgtaattccagctactcgggaggctaaggcaggagaattgcttgaaccctggaggtggaggttacagtgagccaagattgcgccattgcgctccagtctgggtgacaagagcaaaactccatctcaaaaagaaaaaagaaaaaaaaagaaaatgagcaaaattaactcagcagtgaggcccagtgctcaaatgaacaatttgatccaggcaaattgctttcattgtgagttctgcaattgattactaatatctgccatgggccaggaactggggagtggtggtacccaagttatgtatttatcatccctggttagccattcctgctttcttggcatttctttctcaggcagattgtaaatgttggtccagaactttgccatggcatacgatttgtatacagaatggcgattagattttagtcctctttcaccttccccctacacattcccttctttctctcatgtgagccctccaagtaaaattcctttttcagggtgaacaatgcaatattgtacctgacaatgtcgatgatattgtagctgacctggctccagaagagaaagatgaaggtacgttgttttcttttgttgcaggtggcaacataaattgacataaccctttgagaaagcaatttgctaacctgttttaagaaccataaaccatgtgctttgacttggtaatcatatctctgaggatttctcctcaagaaataatcaaaaacaaggccaaggttaggcccaaagcataagggaattggtgaagatatgacatcagaatatatactcaacaacatcaggcctttaaaacaatcatgtaaatctcattttaatgggcttcgcaggattcagaccactctctgcttcgattctcaggccagcctatgaggcaggtgtggatacattcactttcctagcaagcaaagaaaggcccagatcctacaatcaggagggagcgacagagtcatggttcaagctcaagttttcttatgggatctggagccagacaacctggactctcagtagacatgtgatcttgggcaagaagctaacctttctgtctcagtttcctcaacagtcaaatggggataataaaagaacttgcttcatacagttgtcagaattaaatgggataaaacatgtaaggctcttagaatggtgctggtacatgatgagtactcaatgaatagcagctgctcttattcttaccatgacaactgtgtatgggatcattgggaagatgaagccatggcatgtaaataagccttgagcttttcaaaattacctacaatgagcctgcatgtgtctggaaacaatgccaagatgagggactgaaaatgagaagacgttcatgtgttgagaggaagggataataagaatcattctgcttatttagattagatatttattagcaagatgttaaactattatctttaaagggaagtggatggctgcttccatcccaggagcacccaggctcactgaagtcagtctggcagcatggcttttcttgtccccagataagctggtatggggagagggccagtggcagctcccataggttcccagggaaaacatgtcaaacactctttccagatgacacccctgaaacctgcatctactccaactggtccccatggtccgcctgcagctcctccacctgtgacaaaggcaagaggatgcgacagcgcatgctgaaagcacagctggacctcagcgtcccctgccctgacacccaggacttccagccctgcatgggccctggctgcagtgacgaaggtgaggagacaacccagaccagccaggggctggcaggagttcaggaagggagggtctgcctagcagtcagacagtgtccctggtgagggcacaaggaccctgacagtagatgtcagtggggtccaccttgggcaaactcctatctgcaacagtgtcttgagggctctgaacacagaatctctcttatatcaaaggaattcttgagattgaccaccccctccttcttttactgaagagctaacaaacatagatacaacttatgacaagttacagataacacatagcctgcttctgggccttaactccaatctcttcttaaggagcctgttaacagtcagcccagattgaatctagatccattgccctaattctgtcatttacagcccctcatctgtgttccacctcagcgtgagtcagagcactctcacttctttgtgtcaggacctttgggctgattgcagaaattctcagtctatttgcaacagtgcaaaggtcagcctttaagtataatcttgcaacacctatatcatgatggctcaagcttcaagattgcactaagctgattgctgtgcaaaggtcagctatctgcttcccaagccatgacccctttctctgcctgatagatctacgctattctgccctgatcttataggatgccataaggcaatgggaaggcactgtataggctggactggtgtatggcagggaaaaaaaccacttccaagccgaggataaagaaagcaagcttatcccatgcaggtcattaattccttggctctgcctagagggaggctcttaaacacctctcccagtgttgcactttcacgatggtttattgctagctcattttgcccacaataagcactttggaggggagtaaaccctccccgtagactaagtcattcctacaaacaggcgggaggaaagctgggactggcctgtcaacattgaagcctctttcttggggctgggactggggagctaagctgaggagctgaggtccttaacctccccttccacagggaaggattgttcctcatacaaatggattatgatttatcttaaattatatgtagattaaattatatcttatcttagatatatgcgtgtacattttttaaacaccatcctttccatacaagcatctttcgaatgtattttcatgagataaagagtaattctgagtgtcccatgcacctggaaaagaggcatttcctcttagagaactttgccagtttaaggatttagacctcttaggtgtgcagacaacctcaactgcctgactcctcttgattcccgctggcgggaagttcccaccgcgcagcctggcaggcgcccctgccaccgtgcactgctgcagcgttcactcggtgtgttgcagacggctccacctgcaccatgtccgagtggatcacctggtcgccctgcagcatctcctgcggcatgggcatgaggtcccgggagaggtatgtgaagcagttcccggaggacggctccgtgtgcacgctgcccactgaggaaacggagaagtgcacggtcaacgaggagtgctgtgagtgggggccccgggcgggcaggcgggcaagtaggtcggggaggcagcaggtgcgactccaatgccgctggcctccccagctcccagcagctgcctgatgaccgagtggggcgagtgggacgagtgcagcgccacctgcggcatgggcatgaagaagcggcaccgcatgatcaagatgaaccccgcagatggctccatgtgcaaagccgagacatcacaggcagagaagtgcatgatgccagagtgccgtgagtgagagcgggggtggacttggaggaggccactggggacaggcgtggagggccatggcatccactattaccaccataaaggtcggaggctgagcagaggaaagcatggcccatggtccttgctgggcactgctgggagccagatgagagacataggtgtgtagacatcaaccagacccagagagagtaacctccactgggggacattctaagcaatgctggggtggcaaactggtggcctctggatagagaattcacctgcagctgtgttttataggagtgtctttcttgcagtggtggggaggagggccaatacatttaggcgggacatacattacccaggtccagcccactcctcccactcctgttgtacattggacttggctgatcccataaagcatgacctcccctgctctgtgcacaaatgcatatgggcctgcccacacattagtatgcagatgtatacaggcacacaagtatatacacattctagggaattcaggacaatgtccaaaaatgcatccctgagcctctcctttagtgcctgattcttagtgagtgtgggatgtttctgtctctaggaagaccctgctaagatcctcagtggcctttctagtggggacttatgtagtcatattgctaccctcatgtcataaccatcggggggggtcagcagggagatgaaagagagtgaaaagaagagcagtaggctgctgagccacttcttgctccatagatttcactcttatttgaacccatgggccaattccactttattccaggggccaaagcaggggactcggtgtggaacactgtggggtcagggagatcaacgaaaacaaaaggaacctgttctcagtggcaaacctggttcttgatctagacaccatcccatgcttgctgtccccatggtccgagtggagtgactgcagcgtgacctgcgggaagggcatgcgaacccgacagcggatgctcaagtctctggcagaacttggagactgcaatgaggatctggagcaggtggagaagtgcatgctccctgaatgccgtaagtcctggagctcctcaaggcccatcacttctatgttcctgagtccagggagccccgaaccagccagtgctaatactgctagatcctagaataacatggtttgctggggaagagtttggggtttggctttcagtgtttgcagttacttaaacactgcagtcagtttcattaataaagtgagaatcccactaccgtctacagaacacccaaagttaaggttcctgtgaagtctaaatgacagacacatacgaaaaacagcacaaagctcaataaaccttagttctttccctcctctcccccaacaattataggcttgcctgacccatggattttccaagcattttaattctattttccctgtgaccattttaattccccatgaccagaggctggacattaaatcaatgactcctgcagactggtaagaaaaccagcaagaaaacaagccaagttctcaaaaactcaccccaccccgctccactcccagtcctgttttccaaagtctctgcgatcagctgtttatattacatgggactaatctccaagcagagcaagccagtttccttggctggtcttccaagagctgcttttttgggtggtaaaagggcaggcacactggctgtggctctggccccctccagcatgtacttgcagtcgttcatcctccctcccctagctagtaaccttcagccgatgactcagcacctctgttcctcagtttctccatctgtaaaatagcaggaaatacttcctaggttgctctgaggatgaaaccaagtaattggtccaaagtatgagcactggacatggcaaggataggccttacttaatccctgctccatgctccagctcctgggttgttttaggagactcagccatgggtggaggtaacttggaccacccactagagaaagcctggggttttcagtaactaagattggcccatggttcaggccagctcaccagagttggggccccatagccttctgacttagagtgcctggggtccactgaagtaagggagaagaaaatgaaaatttatggagcacttacagggctgggagcatctcatttaatccttacaacctaatgaaaaaaaaaataccatgatccccattttgcagataagaaagctgcctgagcttccacaggcgggataaaagaactgaaactgttgaactaaatgaggacatctaagtccaccaccctgactttggccttgcaagaccaacagagagcttggaataatttacctccctgggacacatcctgacagtcaaactgatgtgttattttcctttcacatttatgagatgctggcttagtaagaatttactggatctcgataaaccataaagcaccacttgctcctgaccctcttctctactgaatgtcccatttctggctcctgtgttttttgcatagaccaccatatatagaacacaggatgatgttgagaatgaaaagctgccagggtgtgttagaaccacaatgtccttggtattggtccacaagggtcagccgcctttagcttgttgacttgttctctccaaagagcagcagggggcttgctggccttgctctgaaaaatatcaccagtgagtttgggactgtgggaagctattctgtacttgaggctgatctgacaatattctagttcacagagcagggcaagaggctctgaacacatcctgaaagtcctccaaagccttcttgagtcatagagggagcatagaatgggtgatgacctggcaccaatcctgcctctgctgcttaccaaccacacgggctgaagtcagcctgcctctttggagcctcagtttcttcttctgtaaaatagcatgacacagcacctgctttgcatccctcataggcttgttgagatgttcaaaggagagcgtgaccatatcttgtttcagacatgtgatacactcatgcccatctgtgtcttgccagccattgactgtgagctcaccgagtggtcccagtggtcggaatgtaacaagtcatgtgggaaaggccacgtgattcgaacccggatgatccaaatggagcctcagtttggaggtgcaccctgcccagagactgtgcagcgaaaaaagtgccgcatccgaaaatgccttcgaaatccatccatccaaaagctacgctggagggaggcccgagagagccggcggagtgagcagctgaaggaagagtctgaaggggagcagttcccaggtatggctcccaagtgtcagcctgggtggtctccaggacaggcagggttctgcactgggctaagtcttggacctgtttaaaaaaaaaaaaaaaaaaaaagtcggggagagtctgcatcttctggagtcttcaggccacattttgattctttagatccaagtttgttcccaaatattgagcaagcataatttataaaggagattggcggtgggggtcatttatcaaagaacatttagataacctaattacctgccaaaaataaattttcaagcaaagaatctttaggaattacagttccttctttacacacatataaaaccaataatgtgtccaactttgctcaaagtcagttatgacttagcaacaccattcactccttgcaaagagggaaaatgatacagatgtgtcaaaggagtcttgtcttgttcatcatttagggaatgttcctgagaacctcccagaacacatcatcttccattttaagggtgtggctcagacaaggcagccgtggcctgagactttatgatttttttttgcaaggctaaccagaagtttatcagcagtgtcatgtcagccttgagttttatttccccaaataatattgatccaagctgacaaataactaatagaacaatgcaccaagtgctcagggagctgaggaatgagcatcatcttacattgactggagttcagggagatgtcagagcagggaaaactagagtgggtcttgaaaaatctagaggagtttgccacttagaaaagtacattccaggccgggcacggtggctcatgcctgtaatcccagcaccttggtaggccaaggcaggccaatcacttgaggtcaggagtttgagaccagcctggccaatatggtgaaaccccatctctactaaaagtacaaaaattagccgggcatggtggcgcacacctgtaatcccagctactcaggaggctgaagcaggagaatcacttgaactggggaggcagaggttgcagtgagccaagagcacaccattgcactccagtctgggcaacaagagtgaaactccgtctcaaattaaaaaaaaaaaaaaagaaaagtacattccaggcagcaagaatagtcattacaaaggcacagagatgccaaagaccatgataggtccaagtgataggtccaagtgataaatgggatgcagatgaagcacagaggacaaggcaggcaggaaaccaggctgggaaggcagggaccagaccacacaaggccagtggcccaccaaggattttgggacctgattctgtaggtggttttaagcaagagggtgactgtatcagacctgtgttgactgatttggggatggcaaacagacacagaggccagataggttttatttgtaacccaagagaaagattatacatccccaaactccagcttaacttcagagttccaggacttcagaagaaaaagaaaatgcctgccagggacttcagtgctgaaggtgcccatgtaaaaaagtgaagattaacatgtacatcaagttttctgatttttaaaggcctattctttttgaagcatgaggatctccttgatggttcaggatccttatgattagggagctgtttgcatatcaaagtgctgtctgttctacatggtagtcagccagtcaacaaacattcattaaagcctactatgtggcaggtacatagttgtacggtacattcctccatgactcttagctgtagtgtggttaacaaatatctcatgtgtaaccataaatgtggtgggttctataaaagaggaatctagagtgctatggaagcagtaatcaaaagatctaacctaattaatctctggggtcagggaagttttcttggagagcagcatgtttatgctgagtaggaagaacaaaaattgtacttctctatacttagcatttgggagccaagtacttggggagtaaggcataagagaaagtggtttagtgttccttatatggctgctgcataagccatcccaaaacagtctttttaaacaatcacttagcaagattctgtggatcagtgatgtgaactgggtccactggatggttcttcttgggtctagtttggactcattcatgtggctactactagctggtggcacaattggaccagaccagcctcacctgcgtatctggggcctcatgagatggctggggcttctctgcacatggtctctccagtggtctagccaggcttgcttacatggtagtagaagggtcctagcagcttttaggcctgtttttgctcatgtcccattggccatggcaaatcatgtagtcaagcccagattcaagaggtggagaaacagagtctgccttttgatgagaagaaccgtgaagcatttgtggccatttttttgcagtcagtcacatacgacctaactgtccctaataacgactctaaccaatcattacatacttgagcagaggaggagcccagacaagcacatttcacagttctactagagttcagcatccctgttccgtcccgtttctgcgggcctaacaaggcattctcatgctttcaggttgtaggatgcgcccatggacggcctggtcagaatgcaccaaactgtgcggaggtggaattcaggaacgttacatgactgtaaagaagagattcaaaagctcccagtttaccagctgcaaagacaagaaggagatcagagcatgcaatgttcatccttgttagcaagggtacgagttccccagggctgcactctagattccagagtcaccaatggctggattatttgcttgtttaagacaatttaaattgtgtacgctagttttcatttttgcagtgtggttcgcccagtagtcttgtggatgccagagacatcctttctgaatacttcttgatgggtacaggctgagtggggcgccctcacctccagccagcctcttcctgcagaggagtagtgtcagccaccttgtactaagctgaaacatgtccctctggagcttccacctggccagggaggacggagactttgacctactccacatggagaggcaaccatgtctggaagtgactatgcctgagtcccagggtgcggcaggtaggaaacattcacagatgaagacagcagattccccacattctcatctttggcctgttcaatgaaaccattgtttgcccatctcttcttagtggaactttaggtctcttttcaagtctcctcagtcatcaatagttcctggggaaaaacagagctggtagacttgaagaggagcattgatgttgggtggcttttgttctttcactgagaaattcggaatacatttgtctcacccctgatattggttcctgatgcccccccaacaaaaataaataaataaattatggctgctttatttaaatataaggtagctagtttttacacctgagataaataataagcttagagtgtatttttcccttgcttttgggggttcagaggagtatgtacaattcttctgggaagccagccttctgaactttttggtactaaatccttattggaaccaagacaaaggaagcaaaattggtctctttagagaccaatttgcctaaattttaaaatcttcctacacacatctagacgttcaagtttgcaaatcagtttttagcaagaaaacatttttgctatacaaacattttgctaagtctgcccaaagcccccccaatgcattccttcaacaaaatacaatctctgtactttaaagttattttagtcatgaaattttatatgcagagagaaaaagttaccgagacagaaaacaaatctaagggaaaggaatattatgggattaagctgagcaagcaattctggtggaaagtcaaacctgtcagtgctccacaccagggctgtggtcctcccagacatgcataggaatggccacaggtttacactgccttcccagcaattataagcacaccagattcagggagactgaccaccaagggatagtgtaaaaggacattttctcagttgggtccatcagcagtttttcttcctgcatttattgttgaaaactattgtttcatttcttcttttataggccttattactgcttaatccaaatgtgtaccattggtgagacacatacaatgctctgaatacactacgaatttgtattaaacacatcagaatatttccaaatacaacatagtatagtcctgaatatgtacttttaacacaagagagactattcaataaaaactcactgggtctttcatgtctttaagctaagtaagtgttcagaaggttcttttttatattgtcctccacctccatcattttcaataaaagatagggcttttgctcccttgttcttggagggaccattattacatctctgaactacctttgtatccaacatgttttaaatccttaaatgaattgctttctcccaaaaaaagcacaatataaagaaacacaagatttaattatttttctacttggggggaaaaaagtcctcatgtagaagcacccacttttgcaatgttgttctaagctatctatctaactctcagcccatgataaagttccttaagctggtgattcctaatcaaggacaagccaccctagtgtctcatgtttgtatttggtcccagttgggtacattttaaaatcctgattttggagacttaaaaccaggttaatggctaagaatgggtaacatgactcttgttggattgttattttttgtttgcaatggggaatttataagaagcatcaagtctctttcttaccaaagtcttgttaggtggtttatagttcttttggctaacaaatcattttggaaataaagattttttactacaaaaatgaaatttgtttggacttccacttgagacagtaaagagagtattagacacccagtaaaaactgccatataaagaagttgtaattgtttgttgtgtatgtatttttttcaatgccaaaccagctgtgatccaatttacatccacattttaggtccaacagcaagaagttcagagagagatttcccaaccagacattgggtcactcactggtcaccttgccagtgcattttattagaagggaatctgttgtagcaaatgggaataaacctgggtttctatagacccagaactg

SEQ ID NO: 203 - DNA, 28432 bp, Homo sapiens
attctcagcacagcctttaaggttccaaacatctgctagaagaggaatgcagatttaaactgagtgaggtgtggagtgggggaagttgattgggtctagaccaaagaactttgaggaacttgcccagagccctgcatgcatcagacctacagcagacattgcaggcctgaagaaaggtaggtccagggacttgccttcctaggctttcgggctgatggcttgtttcacttcctgggttaagaatttctgggaggggaatgagaagaataatgaggccacttcccatgacccaagctggtattcagggttggggtgggttgagtgcacctttaaatgtgcattcggtggggggatgaggaacagtttttgctacagtcgataggagttagaaaagcctcctaaaggctgacattggaggctggataaggttgtttagttacttttgtcccctgagtcttcaggatatcaaaacactgaaagcaacattttaaacctttgactagttacctcatctactgttaatgcccttcttctgtggtctttattctctgtgtctgactggttatttttataactcaggatttaagaacagatgtatcacatgcagaatttggtgtacatggagtagggcacaggcagggtccccagccttgtacatttagatgggctgtggcctgacctagttctccagtggtctttggcactattcatggggcacccaggcagtaaactgaggctgctcatgataaaatctgctaatgaaaaacaccttgtagacttttagcattcttaggataagaaagaagcttgtaagtggtcgtggccattgtaatctttccccagatgaagtaaaagaagccaataaaagggaaataatgtacccagaatcacacaagttaacaaaagggctgggagaaaaacaaaaacaaaaacaaaaacagaattcttggttcctagcccgggcctttcccccttttcccttcccatgccaccacttctgcatccccatcatccttctaaaaccatccagattcaggcctcattttgggtttctagtctatttgacaactttgccaagaaaaacggatggctgtttgtaccactctcctcatgctctctccttgcaattgtgacccatgaggaggatggtgacataaaaatgaggaaataagagactggtggtgctgctgatccacaaggtgactggggccaatagaagagggaagggtggtctgggtttccccacctctttatcaggggtgtgggggaaagacattgtatttcttaagagcctgatgcatataggtgatgtggcaaaaccaaggtttaaattcttctccaacctggaagaaatgtccctcatatgcatccaatattctcagcagttaaaaaaaaaattgaatatagagaagtcaagccctggatggtaaacacgtttttgttcttggggacttcatgtgccgtagataattaacacaaggatttctgtggtggaaaaagaggaggcagttatatgaatttatggccagagtttcttagaatgacaaagcaccagccttgaatgaccagaacctgacctatgttaccaaagaattatgggaaagcataggagtcagttacaagctttattttgatataattgctctgccctcgaggaagcttacagtcttaccagagaggcactaaacacagagagagaaccaccagtgcgtttgataagacagacccaacatgtcctaaattctcagtctgaaggtgtgcctgagagattgaggcagaggttcttttacattaaagaagaataaagtacacatttagatggactaagaagaatcatctttagtcactttccaaataactttgacttttgcaatgtagaaggaacataacacatttcttaaacccttatttaccgtcataggctgactaatccacatgtgggcaatggtggggaagtgggggaatagtgtctgagagaagatagagactataaaatgctgttcatgtgtgagaagattagatgatgtggtgggtttgtttttgttcttacaaggtggtcacaagaggggtggaacattcctgcaaatggtttcaatatatgcagatgtctcaatataggaatgaaattacgtctttggaacaacttaaataagtcaaatatacttggagctttaaaaattaaaaggagagagattcgaggtaagactacaatagatttgtgctgaagtagccgagcttttgttatcaacattaaaaattttaactttatgctaagggtggtgaaatataaaagaaggcttttaaaggggatggtgactcaattgtttttgtatttgatcattctggctacaacatcagtggtggattgaatatccaaagccacaaatggacacagggaacattcagaggctataatgaatacttctgataaaaatagaataatggcttgccttgagaagatgggagaaatacacagagttgaaaaatggttgtgtaggattagaatgagattgattgagcatagagggtaggcaatggaaggaaccaatgacaaactatcagatatttttgagacagggtctcactgtgttgcccaggctggagtaccctgatgccattgtggcttactgcagcctgggcctcagcctcctgagtagctgggattacaggcgcccaccaccacacccagctaatttttgcattttgtgtagagatggggtttcaccatgttccccagtctgatctcaaactcctgggctccagcggtcctcccaccttggcctcctatactgctgggattacaggattgagtcaaaatgcccagctttaaacttccagatttttaacatggatagtgtagttaattgctggaccttccaccaagaaaggacacttgtaatttcatagccctcttagggttcctgttccctttagctcttgccactcttgattagcaactacttacagggctctgaaataatctccacataggaagatttgcgccaccttacttttttgaaagggaaattttgaggaagactggatgtcttctatttaggtcttctaaggtttgaaataaaaataacctcttctcccttctgggacaagtaggtaaattgtcaatttatgggctttattagaatgactttaaattaagcccagagaaggacaattcccttaagtgtaacaaaatttgaggatgtggattaaatgtaagaccaaaaataagacctattttattttagccatatgctccaaatctaaattttgtgttctgtctaggaagtgctaaagtgtatatataggtctgaatatacctactccatcgcatataaatgcaaaccacctcacaaattccattatcattggaacagagactgcaagaggaagacaagggcctcttggcccacctctacgtagtcttgttatctaacttattccaaattgggtggtttctaccttttagctattatagataatgctgctaagaaaattaattgtacaagtttttgtgcaaacaagagatcttccattcaccagactagtttagtggatccccttaagcaaaggagttctggaattacatcacctggatttaaattttggccctgccactgtttactcaagttacttaatcttgtgtttctataattctgtcctgtgaataatagaatatatctctcaggggaatttaatgatgaaataacacatataaaacatttaaaccagtgcgtgtcacttaataaatgctaaatacatattgactattattactggtattcctactatcacttactcatttctggcttgaagtataaaacataaacttcctttaacacttcctgccactcaaggacatgctagacagggactttactcctgtcatgaccctgctccaaccttctccggtcttggggaaaatagaaaagcagataagaggggtctatataattggtgagagcatgtttttcatggtaccatgtggtcagaggttgactcttcctctcttttgcagtttgtctcaaagattggtcagaagagtcaggattgtcctccttttttgctctcagtaagttagatacaagactatgcagaggcgggcctagaggctctcctcttcctcttgcagtctctgttctaatgataatggagtttatgaggtgggttacattcacatgctatggagtaggtacattcagacctatatcgacactttagcatcctctgagcagaacacaaaatttagatatggatcaaaggggtaaaataaaatagcaggccttattttttgtcttaaatttaatttgtactcgcaaattttgttaaacatcagagaactgtccccctctgggcttaatttaaagtcattctaataaagcccataaattaacaatttaccaactgccccagaagggagaagaggtaatttttatttcaaacattagaagacctaaatagaagatattcggccttcctcaaaatttctctttcaaaaaagtaaggtgttacaggaaaagtatgtggaaattatttcagaaccctacaagcagcctctaatcaagagtggcaagaactcaacgtaacagaaaccctaagagggctatgggactgcaagtgtcctttcttggtggaaggcccagcaattaactacattgtctgtgttaaaaatctgtaagtttaagtttgggcatggtggctcactcttgtaatcccagcactactggatgctgagacgggaagatcacttgagccctggagtttgagaccagcttgggtaacatagagaaaccccatctctacaaaaaatacaaaaattagctgggtgtggtggcacaggcctgtaatcccagctacttgggtggctgaggtcgaggctgcagtgagtcacgatagtgccagtgtactccagcctgggcaacagaatgagaccctgtctcaaaaaagtctggtagtttattggaggaaccagtccccaatatttcaacataggttcttttctattttccctaagtgtcagccagtctgagaaataaagagaatgagtacaaaagagagaaattttacagctaggcctccgggggtgacatcacatatcagcaggcaccgtgatgcccccgagctgcaaaaccagcaagtttttattagggatttcaaaagacgaggaatgtacaaatagggagtgggtcacagagatcacatgcttcaaatggcaataaaagatcacaagggcagaagggcagagcaaggtcacaaggccagggtgaaattagaattactaatgaggttccatgtcctgctgtgcacacattgtcattgataaacatcttaacaggaaacagggttcaagagcagagaaccagtctgactacaattcaccaggctggaatttcctaatcctagcaagcctgagggtgctgcaggagaccagggtgtatttcatcccttatcttcaatcgcataaggcagacacccccagagcggctgtccataggcaccccctgggaatgcattctcttcccagggttattccttactgggaaaagaattcagtgatatttctcctacttgttttctgcaataagaaaaatatgactttgttctgcccggccccgcaggcagtcagaccttatggttatctcccttgtttcctgaacatcgctgttatcctgttctttttcagggtgcccagatttcatattgttcaaacacacatgttttacaatttgtgcagttaacgcaagcatcacagggtcgtgaggcaacgtacatcttcagcttacgaagatgacgggattaagaaattaaagtaaagacaggcataggaaattataaaagtattgattggggaagtgataaatgtccatgaaatcttcacaatttatattcagagattgcagtaaagacaggcataagatattataaaagtattaatttggggaactaatgaatgtccatgaaatcttcacaatttatgttcttcagccatggcttcagccggtccctccgttcggggtccctgacttcccgcaacagtagtttgttattaatgacttctattacccaccctctatgctcagtcaatcattaaatgatgaccttctttgcctcttttgacagtttttgacttgaagtttattttacatgatctaagtacaggtaattattctctttaggctagtctttgcatggaacagtccatcccttaactttcaactatgtttcttcttaaggctaaagtgagtctcttacagcatctggttagatcttgttttttaaaaattttccagccgctctttgacttttgttcaaagatttaattcatttatatttaaggttagcattaatggataaggatttactagtgacattttattattttgggggggtttgtttttgtagatatttgtttctttcttgtgctctggtctacctttgtgatttagtaattttatgaattgctaagctttgaattctttaacgtttgtgtatctgctgtagttctttgccttgtactcatcattaggcttacataaaaccacgtagttttataaattgactattttaaggtgacaataacaatgtttgttgaaacaagaactctagacttgtactgtcctcccacaaaactaaatttttgatatctttgttttctgctgctgtaaaaaaccattgaagactgggtaatttattataaaattgtattttgcttatagctctagaggctgggaagtctaaaggcatgcatggtgtaaacctctagtgaggataatcccatgaaggaaagtggaagtgagcgtacaaagcagagagagagatggggccaaatttattcttttttcaggagtccactcctgtgataactaaccttctccaaggataatgacattcatccattcatgcaggtagaggtctcctgatgtaattacctcttgaaggtcccacctcttaatactgttaaaatggcaattaagttttcaaatgagttttagaggggacattgaaaccatagcatctcatctacaaccctccaaaactcatgttcttctcacatacaaaatacaatacttctgtctcaatagcctcaaaatttttacccattccagcattgactctaaagttctaagtccagagtcacatcagaagcagatatggatgagactcaaggtatgatttatctggaggcaaatgtttccagctgtgagcctgtgaaatcaaaacaagtgatttgtcttcaaaatataatggtgaaacaggtgcagaatagactttctcagttcaaaagaaataactaggcaagaaaaaggtgtaagtggtttcaagtgagtccaaaacccaaccaagaaaacagcattaagctttaaatctggagaataatttcctttgattctatgtcctaaatcctggggacactgattggggccctcagacagtcctgctcccatatctttgctgggctcagtccatgcttcagctctgttaggttggcgttgcatgctagtggccctatagttccgagatctcaaaggtagcctcactaccatggctacactaggcatatccctaactgggactctgtgttggctctgaccccatatttccactcagcattgccctgatggaggctctttgaagtggctccactcccatagctatttgtgacatcctttgaaactaggtggcgaaagccatgcccctacaactcttgcagtctgtgagcctatagagttaacaccacatggttgccatcgagattgacagcttgtactttttaggcacaagtattatagtggctgtggagctggggtcttaggctcagagtcttgcaaaactactgtggcacaggttcactcaccaaggcatggatggatgcagattacccacaaagctgaggctgtaactttgaagcaaacctcagtaactcaagcccatggggcagggatggaagagttactgattctggggtcagtgcacaacaccagcatggctccagggaaagaggggtgctctggaggcttgagctctggggagcaggttacagttgaaattttggttccagagccactaggacactgcagcaactccatccctgggtgatggagtgccacatagtggtaactctagacactgggatggtagggcatggcaatatcccaggctgtgtaaggctggatgtagcagcagcaaggcctcaggaatgactaagcgtgtctgtggcttggtccttgggtttcttgaagcagtatagaaatgaccccctggggagccagggtttctcagaagcttggactccagggaactagtcagttctagggaggtggggcactgcagttattttgcctggattgttgggtgacacagctcaatcaaagctatatgtcctcagagagtgggccacagtttcagcttgaatttggaggggcagtgtgcaccagcaactaagatgggggcatggagcagttccatggcagcctggcctcagcaggtagagagtagacagcagcagtttggctcaggtatggctaccaggtgtgtgtggtgtagtggtggttaagcctcagagatagaggtgtgcaatagctactcacttctgaagcagaatgcactgtagcagtgattcgtttccaagaaggggcaacacagtagcagctcaggccatggaggccagggcatagtgtcagcaccacctctgggataggacagacatgtggacttcaggtagctccatcagctgagctcagagcctgtgaagactctaagtgtctccagtagtaagattacaggtatccatggtggtgatgggagctgctggggtcctctcgcttaccttctccctgcaggaagaaggctctgctgactcagagattgtcctaactgggggaaggggtggtggaagaaaggtgttttatctccttcttcatgtagccatcctgggtttctatgatctacaagatttctgctactcctttgctgttttcaggtgctcttctttagttactttagttggaatgcatttgtttattcattgttttggggagtgtgtgtgtgtgtgtgtgtatgtgtgtgtgtgtgtgtgtgtgtgtgtgttgatgatgatgagggttaggaacttctcgttggccttcttggtgacattctttagaattctaatcagacatattgtagaccttttaattctacacttctaatcttttaacctcccttctattatgaccattttcttgtttctctacagaattcttggtgatttcttcaaatttttcttccagttgactaattctattttcagctattccttgttatttaacacattggccaattgttttctgtcaacactattttgtatttgaaatttgagattatgttccaaatatgtcctgtcactctatgtgctttatctttgacttcatgtttgtgatttaattttcatttaaataagttatctatactctttacatattctatatgtgatatatatccagatgctcctaatctgtgggacttcttgcaggcttgtatcaaggatatctacttccttctttatggactccaatggaggacttattcagagactgattgccttctaaatatgtgtctttttggtgatttctcctttactactgacttcgatgattctcagaactatacttttccagggaagtgacagttatcaactgatgtatttaattcccaggattataaacagtaatttatgttgtacacctcagggggggcctctcatccttgataagtatactctgaaatctgtggccatggtgtcctgtttctttcatactctcactacacttctccccaaatttatcatcatgtaatctttgtttctaacactcatttcacctgatttatagaaatgttagttgtttcccactttcataaaaaaaatggagttctaattctgtttgtccaaattgttttcggaacttttctaaaagtgaaaagaataagaacattgattttttggttacattcttatatataattccttatcttaactacttcattcacatttacattatatatttcttatttattatatttgtctttcttttttaaaagaaatacttattttataatttgtaattttgtactttttattttactatttttcataattttaagtatatacattactaaagttaaattaatgttctaaataattaatcttttcattttaacgtttctcctctatctttctctgaaattcaccccccttcttctgactttaatcagttttattgttagatagctaataatttatttccattgatgtatcaaaaataaatacaggatgataattttttcagagaaatcttaatttttttctcaacatagcaaatttggagtacaacaatttttttttcatttatggtaccaataaaagggcacacatctcaaaacgagacttttataggggctcagtggagaataagtggtatcaaaattaactattacttgaaggatattagcaagcttcatttccctaaaaatttatggaagttgatcatgaaacacctgaatatgaattcaactacatagataaaaatttccatgtgactttagcctatctctacatgacttggttggagttattatactgaggacagaaagagatataagagtaatatgtttgtgcttagattctcaaaaaatgatttgatggatccttgctatgcaccagcaagttaggatttaaagcaatgtaataggacaagagatttagatttgtggtgccaagaatatgactgagagccataagtttcattcccaaagttcagagtttgtggcacaaaatacaaggttacataaatcacactcagcaaggaggaacatgggaagattttcagccctgtgaatttaactgtgctctgattagaaaaggaggaactatgcaatactatacaataaattggaaggcagattagtttgtgtagtttattactattataaaagtaatccttcagctgggtgcggtggctcacacctgtaattccagcactttgggaggccgaggcgggcggatcacaaggtcaggagatggagaccatactggccaacatggtgaaactctgtctctactaaaaatacaaaaattggctcagcatggtggcacgcgcctgtagtaacagctactcgggagactgaggcaggagaatcgtttgaacccaggaggcagaggttgcagtgtgccgagatcgcgccactgcattgcagcctggtgacagcgtgagactccatctcaaaaaaaaaaaacaaaaaaacaaaactaaaaaacaaagtaatcctttgtgggtaagtggctgtaatcaagggattaggcagtaagagggatagaaataaaatctgagccgacttggaattggaacttaaagaaatttctctaattttagaggtccaacaggtttacctcgcttctgtcaacatgtccctctctgcaggattttctagcatcttgatatcatatgacatttagtttctctcccacctgcccccgccccacacacacacttaatgtgttgcctattccacttccccagctctaacagctattatgatatgggaagagaatgtagaccagattctgtccttagggaggaacctgccccaaagtgtcatgtcctcttttgccatttccaggacatcatactaaattacatttcttattgtagcaccttttctgctgccatgacaaccatgcaaggaatggaacaggccatgccaggggctggccctggtgtgccccagctgggaaacatggctgtcatacattcacatctgtggaaaggattgcaagagaagttcttgaagggagaacccaaagtccttggggtaagttgcaaatctaggggaagaccaatggtgttgcaaactcatatttcataagacctaatgccaaatacactgtcccactagcctcataatacaacagccaaccctcacgacgtcagtaattacttttcaggctcttcatctgaaaaactatatagtattctgtcacaacatgcttccagttgagttatatttaaaatatattgagttcagatctattctagggttgtgggtcatccatgataattgtatttaaactcagtgtggaaaagcagcaaaataaaaggccacctatgcactactagctgacgccccctttacaggccttcctgatagctgacaggcacatattgctactatttctttctggcaccttttcttagccccctgctcagaggatgaaaaatctatcctctgagcatttccatctggagtctcagatgagcatgcccaaaagaaatgaaggattaaaagaatgacagaatagggcaggtgaaaggatattaaatataggtttatcactagcccaagcttcaaaccacgggaaaatgtcactgtggatattctggatccttttttcacattattcattttctggagggggggaaatatagttatttctcataaaatatgttatttatgttggcacatactaggtttgtttgtttatttatttttaattttattttttgagatggagtctcgctccatcatccaggctggagtgcagtggcacaatctgggctcactgcaacctccgtcttccgggttcaagagattctcctgcctcagcctcctgagtagttgggattacaggcatgagccatcacacctggctaatttttgtatttttagtagagacggggtttcagcatgttggtcaggctggtcttgaactcctgacctcgtgatctgcctgcttcagcctcccaaagtgggtttattttttaatgtatgaataattattttaaaatatactgtatgttttagagcagttttaggcttaaagaaaaattgagagcaaagtacagatctatcccatatgccccttgcccccacaaatgcatagctttttaattatcaacctcctccaccagcatgtaacctttgtaccaattgatgaactacattgacacatcattactaaaagtacacaaatcacaatggggttcattctctgtgttgtgtgttctgtgggttttaacacaagtatagtgatatgaatctacctttgtagtatcacatagtatcccaccaatccctggcaaccacaaatcttttattgtcttcatagtttgccttttccagaaagtcatacagttggaattgtacaataggtgttttttttagattgcgttctttcacctaaatacatgcatttaaatttcctccatgttttcttatggcttgatagctcatttatttttagtactgaataatatttcattgtctagaagcaccacagtttatttatgcattcacctactgaaggacatcttgatggcttcccaactttggcaattaggagtaacattgctataaatatctgtgtgcaggtcatgtgtggacataagtttttcaactcatttggttaagtatgattagtgtattgtaagtaagagtacgtttagttttgtaagaaactgccatactgtcttccacatggccttgtcactttgaagatttcaatcaacagtcaatgagttcctgctgttctgcaaaatctccagcaattggtagtgccagtgttctggatttttaccattctaacaggtgctagtggaatctcactatcatgttaatttgcatttcccttgtgacataagatgtggaccatcttttcatgcgtttctttaccatctctatatcttctttcgtaaggtgtcttgttaaattctttggcacatttttaatgaggacgtttatgttcttattgttaagttttaaatttgttgtatattttgggtaacgatcctttgtcagatatgactcttgcaaatatcttctcccagtctgttgtttgtcttttcatctcttgacaatgtcttctgcagagcagaactttttaattttaagaaaattaagatgatttattctgtatttcatggtttgtgcctttggtatcgtattgacaaattcatcaccaaacccaaggtcatctagattttggcctatgttatctgttaggagttttatagtttttagtttaatatttatgtctgtgattcattttcagttaatttttgtgaaagatataaggtatgtgtcttttattcttacttatggatatcaagttttaagtactattttttaaaatactttttttttcattgtattactttagctcattaccaaagatcacttgactatatttgtgtggctctctccaggctttctactctattccattatctatttgtctatttctttgctaataccacacagtcctgattactatcactttatagtatgtcctaaaattgggtagtgttagtcctacaactactacttcttcttcttcttcttcttcttcttcttcttcttcttcttcttcttcttcttcttctagattgtgtttgctattctgagttttttgccattccttataaattttagagtcagtttatcaatatatacaaaataacttgctgggattttaatggagattgtattaaatctactgatcaagttggaaagaactgacatcttgacaatgttgagtcttcctatccatggacatggaatatctctccatttattttatcaaagtttgtagtttcttatagattttgtacatttttttttagatttatacctaacaaatgccaaataccaatacctaaatattttatttttagaggtgctaatttaaatggcattatgtttttaattccaaatttcacttattcattataagtacataagaaagtaattgtctcttgtgtattaatcttgtataaatcttgtaaacctaatataattgtttgttagttccaggaatttttggttgattctttcagattttctacacagacatcatgtcgtctgggaacaaaggcagttttatttttccctgaccagtctgtatatctttatttccttttcttgtcttactgtttctgctatgacttccagtacaatgttgaaaggagtagtgacagggctcatccctgccttgttcctgatcttagtgagaaagctttgagtttctccattaagtatgaagttagctgtaggtttttcacaaatattctttatcaacctgaagaagttctcctctattaataggtttttcaagagtttttataataaacaggcattggattttgttcaatattttttctgcgtctgttaatataatcatgtgatttttcttctttagcctgttgatgtgatgaatacattaatcggttttttgaatgtatagtcagtcttgcatacctgggataaatcccaagtggtcatggtacacaatttttttgatgcattgttagatttagtttgcagatattttgttgaggatttttgcatatttgttcatcagagatgttggtctgtagttttcttttcttgtaatgtttttgaatgatttttggtagatggtagtgctagcttcagagaattagttaaggagtatgtcctctgtttctattttctgtaaataatggtataatttttttcttaagtgtctggtagaattcaccactgagtccttctaggtctgatgctttctgttttggaaatttattaattattgattcaatttatttaataattataggcttattcagagtgtctcttcttgtgtgagttttgacaaattgtctttaaggagttatccattttatcaaggctatcaaactgtgggcgtagaattgttcataacattattttattatccttttaatttctatgggaactgtattgatgttccttctttcatttatgttagtaatttttgtcctctctctttttcttaggctggctagaggctttttaaattttatttatacatacatatatttttaaaaactgctttggattttattgattttgtttattcatgttctgttttcaattttatgatttctgctctaatttctattatagctcttcttctgtttatttggagtttaatttgcacttctttttctagtttcttaaggtagactctcaggagattgattttagatcatgattttctaatatattcattcaatgctatatatcttcctctaagcattgctttcactacatcccataaattttgataagttgttgaaatgtttttgatcctttggaatgccatgggataatggtactcttactctgctacgtttagatccctgtgtactcatacttgtgtcctcataccccagacttcaagaaaatatcatatttgcttttcttgttttcttcccttgtatatactctcctttcttcaggttacttctccttgctacaataattgctttataattcctaggccacttctctgagctcatgagaaaaaaagagaaataattgtggtagaagtaacatcgtaggtatcagaaaagcacctctgggctggttctggcatactccttttaaccttgaaattattggcaatgatagacgtcgcgagagataatattggtaagattacattcacggttatttatgtgaaaaaagagtgataagagaatactaagaaggtcatatgactatcaaatgaaggagaataaggatagcttagtgattggaaagggggtggcggaagcaccatttttgtggtggacaatcagtttttgctttcttcaccatttttaggttgtgcagattctgactgccctgatgagccttagcatgggaataacaatgatgtgtatggcatctaatacttatggaagtaaccctatttccgtgtatatcgggtacacaatttgggggtcagtaatggtgagtagagtatcttttgatataattgaagataacataaagcagttgtcaataccctgatctttggaatcctattctaaccgtatcttgtaattctgtaaatctgagagtggtatctaaccatttcttactcaattttctcatatttaaagtactacaaataatatagtattatattaaatctaggcagattaaatatttatatatgtcagttagatatattacagcagcacattgccaaagacccaaaccagaatggcttaaacattggaagcactgattatttcacaacaagactagtggcttatcatttctaggatggcttcattcagtggtgcaaggatttcatcaaggattgctagcagaccacatcagaggggagatggttgacacatccaacttttggtaaatatttcatatacatattcccaaatcaactgtcagtaaggataacggacttgccattattggcttggactaatcaagatttacctctgtagctgggaggagtctaccctacctttagctcatgagaaactgaacaaaatgatggtttagttagcaaggaagaagaggagatgtggctggtacacaagcagtttctaatatctagtctactgactatcgaaactcaggaaattgttacctcagaaaatgaaaatgttatttgatatattttgtttcataaattcaataaaataactaattattataattaatattaaattaattataactattattaatattacattaaaattagaattggaatttaaatttaaaaaccttctcccaagagaaaacacaagatagttttaatgcaaattgagagtaaaattgagaataaaataccaagttttatccattgaagagagaaaaataaaatttataagttgggtttatgttagaatcagggaatctattctagcattgcagggtttccatttatttctaaaactgagaatgaggtagtgtagagttttatagaagagcttgctttttgatccccttcacctgtttacagcagaagtgcaagattggaagaacagtaaagctgtgttttacttctagaaagctgcacaatacttcatatatccaaaaatactgatgccaataacagctcttattaaactcttactatcatgtggacactctacttagtgctttatatgtgcaatttcatttcaaacaatcaccacgaacttctgatttttcattataatcattttatggatgaagagaggttaagtaactaacccaacatcacaactgcttggtacaggaatgaagattcaaatagggtcaatgtattttcagaattgcatacatctaactacttagttttctgtttttatttccgtttccttttcaagatcacattaaaaaccagcttacatggtgcaagccttccacacatgttcagtagattaccaggaactgcaggagccatttgtccgctgagacatcactgagactttcgtaggtgttccattagatgagcctttacttaattggtgaactcttttctgcggctaccttccattattctttcaacctttttttccaaacctcttctatgaagtgcctcctttttctctttcatacagtataagtaccaataccaagaaccagtcacaagttcctcttatttttggcctcttcagttctgtttctgtatatgtttcacattccttgttttttcctctgagatagtacatacatactttttcctgtggcaaatgaagtcctcttattcaatcccatcttcaaatacacagacatacatacacacttgtaatgtgtatatataatttctgtatagaatgtttttccaaggtgccttattgaatttttagaatagtttatggtaatttttagttcacgttcttgaatgtttgcaatatatattgttcatacttaaataagaatagttaaaccacttgttccaactatttttcttatgtaattattttggtaaatatacccagaatagtattacataatagtcagcatctttatcttgattttgactttaatgaaatgatcctacatttttatcattaaacataataaagacttttagactgagacagatttctatcatgttacagaaattacaattctttttttttttttttttttggtttttggtttttggttttttgagacagagtttcgctcttattacccaggctggagtgcaatggcacgatctcggctcactgcaacctccgcctcccgggttctcaccattctcctgcctcagcctcccaagtagctggaactacaggcacccgccaccacacccggctaatttttttgtatttttagtacagacggggtttcactgtggtctcgatctcctggtctcgtgatccacccgcctcagcctcccaaagtgctgggattacaagcgtgtgccaccacgccctgccaataattctttatattttaccagtaatgttgcagttactaataatgttgaattgtattaaatgtcctagcctatcaacactgtaaacatgaatagcaataagcatgtaatttttttcttaaattcattaattgtgtaaattagaatatttcaatattaaaaaatgtttgtagagctgaaggaacatcccaaatgttcatgatgtattttatatcatatgatgggtgattccctctagtggttttattccagtggtgatttagatatcatgaatcatctctatgtctgggtatttggaagttaaataaatttattgagcttttttattagttctgtattttttatattatgatataatctttgaatcatctgaaatcaaatttgaaaagcaaattaaaaactccaacaattgaatattaaaagatagagagtctaaccaacttgactagttattttagctaaatgaaaaataattgcctattgatggaatcaaatgaactactatattctagtcatcatctaattgggaatttacatttttttgctactattttgcttataagtttaaaaatattggccgggcgcagtggctcacgcctgtaatcccagcactttgggaggccgaggcgggcggatcacgaggtcaggagatcaagaccatcctggctaacacggtgaaaccccgtctctactaaaaacacaaaaaattagcccagcgtagtggcgggctcctgtagtcccagctactcgggaggctgaggcaggagaatggcgtgaacccgggaggcggagcttgcagtgagccgagattgccccactgcactccagcctgggcgacagagcgagactccgtctcaaaaaaaaaaaaaaaaaaaaaaaaaaaattctaaatgagaataattttagtgtattttttgtttaaatatagtcatcaattttggtaccatgtaagaattactttgtatcaggagtttggaaactatcttttagtgccctcaaacagttttaatatcatttcagttagatatttgaaaaacttgataaattctcccatggatttatctggtattatttctctgttctttctgggaaaagggaaaataatgtgcaaacctttgtggttttctttaagataattggtctgattaacatatctatctaatttagaattaagtttagtaagttatgactcccaatactggcttaaagttttttaccttcattttttctctcatttttagtttattatttcaggatccttgtcaattgcagcaggaattagaactacaaaaggcctggtgagtaatattttctttttttggtatcaaaaaaaggaaggattaataaaaaatgtattctgccagggtgtaaaacaggttttgtttctttgtttgtaaaaaatcaggagcgattgtgcattttacctactagaatctgtctttcaaaaactgcagtcaggctaattgctgacataggactggatattttggcaaggtagggaatcttacgcttgtggagggaatctttttgaagatatagagaattattgagaagaaatatcaagtgggaccgctccaacaaaaccctgcagcatgagtcagcccatgatagtgacaccaagcattggtgttgtgtaatatttactgacccattgattataatgtagactccaactgtgtccagaaaggattttgagttttcaataaaagaaattcacaataaggttattacataagaagcaaatttaaaatgtaattctcatgccaagatgcctttcataaagccaatacaatgcgaaagtccatatctgaataaatgtttttttctagttaaagtccatatttgagttttctttgttcaaaagataaatatcaaattctggagcatgatcaatatgggttttccaaatctggcctaacccaactccctagtgtcccctccggctgcagccacattactcatactcctcacactttgctgtgcaagtttagttcttttttgtttgttttttttctggtttttggtttttggttttttgagacagagtttcactcttattacccaggctggagtgcaatggcgtgatctcggctcaccgcaacctccgcttctcaggttcaagtgattctcctgccttagcctcccgagtagctgggatcacaggcatgtgccaccacgcccagctaatttttgtatttttagtagagatagggtttctccatgttggtcagactggtctcaaactcctgacctcagattatccaccccgcttcggcctcccaaaatgctgggattacaggcatgagccactgcgcccagtcagcaattttagttcttattaaaagcctccttacctttatccatgagaagagaacgtacagaaaagaatatactgctgagagagataatatacaaaaggtatagaggcatgacaggcaaacagcatttagaaaaatgataagaaatcaggcatcagaagcaaggagtggcagggaaggacacagacagggctgtccagctaaagtgtgaaggacattgaaaaccctgctaaagagatttggagattatattatgtgcccacgggaatcatctgaagaattgaagctgcggaataatgagatcatgtttgtgttttgccaagagattagagttgaaaccacaagacaagttagaagactattgaaataatcaagataatgatagatggcagtaagaaagagatggtgggtgtaaagtgattcatggagatatatctgaggatgttgttggattgtttaattgattttcattcctttctaggtccgaggtagtctaggaatgaatatcaccagctctgtactggctgcatcagggatcttaatcaacacatttagcttggcgttttattcattccatcacccttactgtaactactatggcaactcaaataattgtcatgggactatgtccatcttaatggttggtactgcctcttttcaggggatattattatagaagcaagtttggggagtgctggctctggcaaagacaataattaatattccctaattgatgaatgactttgggaagttggagtgattgagaaatagaataatctttcatttaggagttaggtacatgtctcatctctgtctttattcttctatatatcatgaggcaaaatgggaagaaagcttatagttatagaatacctactcattaatagttactgtgctgggtattttgtatacatttttctgtttaattttaaaacattgatgcagtacgtactgttatcccctctaaaaatggggccctgatgtcagtccctattctctaataatgaagtaaaattgtcttgaacagtattttacaagtggtgagtagctcagtatcctttccaacatctttggatgttcttgcaaggttaaccacttttatcctcaacatctagctcctgataaatctcagtcttcattatgacttttactacttttttgtaccaattgttcttatcttaatgctatcctaattgctttattctgaaaatgccacctacacaatattttgtaggtagtaaaacttcttgatattttgggccattgggtaattgtggggaggaaaagttattgcagcacatcacagcagactaaaatgcacaattaaatctttattattaaaaagcctggcagggcgcagtggctcacgcctgtaatcccagcactttgggaagatgaggtgggtgggtcacctgaggtcaggagttcaagaccagcctggccaacatgatgaagccccgtctctactaaaaatacaaaaattagccaggcatgatggcacgtgcctgtgatcccagctactcggggggctgaggcaggagaattgcttgaagctgggaggcggaggttgcagtgagccgagatggacacattgcactccagcctgggcaacagagcgagactgcatctcaaaaaaaagagaaagcctattggtcattttgaacacctgcaaattttttgttactttccctctatatgaactttcagcctttcaccttgctgcttagttctcttccttaccacgttcttcgcttatgtaaacgtggaaacccaacattcttcctaacttactaagcagaatcagttgcattctgtttacttcattcctagctaattctacatagttttgtgggctatataatcacaccaaaataaccccttgaggtgtctttgctaaactaatttacttcccttgagatttctattgctttttatagtaagcaattttacttcttgccactcgctcaaaataagaaaaagcttctatagagaatttgacaaattctttcaaggtctttcagttagaaactggcaaaaggaagattagattctacaatttcttgtctctaattcccctattatttgctatttgtatcctgcagaaggaccttacttttagtttacgaagttctcttcattggtagattttaagggcacaatgatagagacaaaatctggaattggccaacttgatagggctgatttcgtgggcatgggacctgtgcagttactcaggacttcacagttaaaagagccctgtgcttgatctaatgctctgctgttgctatcttaaaattgtttttaaaaattttaaacaagagaatctaaattacatagctggtcctccattcatctcaatcacctttcccagagtccatgatgaattcctgttaattgtgtgaacatctttatgcctgttcttatagcagaggacctccataagggcttcctgggatttgaagtaatggttctattcttgcctgggcacctgcacaatcagtccacaggtctatatacatgctacctttttttggaggcccagccctgtacctgtttttgtaaataaagtttcataaataaagtttaattgaaatacaacgaagcccatttgtttacatattgtggagtgctgctttcgtgttataacagcaggtttgagtatgtgtgacagagaccttatggtcggcaaaatctaaaatgtacattatctggcctttacagaaagcttgccgtcttctagtctacacttctagatggtaaaatccttgaagacaggggaattgtctgttttgtttgctgctctatcttctgtgcctacaacaatgttggaaacacagaggccactacagctgttgaaggcacaagaaaataaataagcaatgaatgcaaatattctcaaggtctccttaagtctgcctcactcatatcctgagctcttggtctattggctcttctgcaacagagggactatccctaaccatggagagaaaaagagagaatatttaaaccagataatccctgcatcaatccgggggaaaattaatagaaataagtgtactgcccaatgttttccaaattttgaccatgtttcttggctgaagactagccctaaagccagtgctctgggcagatggattaaagactgacctacttgatgttcattgttgtattagcttcttattgttactgtaacaaattactacaaatttagtgtcttaagacaacacagtttggttatcttatgtttctggaggttagaagttccaagtgggtctcactaggctaaaatcagagtgttggcaaggccatactcctttctgaaggcttaggcaacaaaaagttttattgccttttctggcttctttaggctgcctatgttgcttggtttgtcatcccatcttctaccttcaaatcaagcgatgtagcatcttcaaatctctcttgaactctattctggctcttgcttccacttatatggattttatggttattttgaacccacctgaataatccaggaaaattctcttatatcagctaataagcaatcttaatttcatctgcaaatttaatccttttcgctgttcaaaaagaacaatggtcccccagggaggtctgcattctaatctccagaagctgaggattagattctctgcttacaattactaagatatggaatcatagtattttctcaatgatatgagtttctagtactcaataggatatgatgacaattatctttatactaccttcctaactttttaaagcactttcatcttccatgcccacaatagcactgggaggtgctgaactagggaataaatgtctgtgattattttatcagtgaaaaaagtgagaagctacttcagcagatcaagaattggtcaagggtatggctgccattgggaggcaggtttcctgactcccagccagtgctttttctcttatgacattgtggttactgggaaatgttttcacttgtcatctccatttctcacattcctttgttatgagttttctcctagggtctggatggcatggtgctcctcctaagtgtgctggaattctgcattgctgtgtccctctctgcctttggatgtaaagtgctctgttgtacccctggtggggtgagtattggccttcatttgaagatgactgtattagttttctattgctgtgtaatcgattacacacacttagagtcttaacacagaacacattcattatctctcagtttccatggttcaagagtctgagcccagctgaagtatgtccttgactcaggatcttacaaggctgtcatcagggagttggctggggctgtggccttgcttggagcttctgattctcttccatactaatgtggtggaattcatttcctctcagttggagaactcatgacaatgtattttatctttgaaatcagccggttgctaatgctttaatcctctcacaaagggttcacatgaacggatgaggtccattcagaataatgcctttcttgataaactgaaagtcaactagttagtacctacacacaggacttgtatctcatcctatacacaggttccatccacacttgagagaagggaatcacaagggttcagtgagtgtcaccttagaactctgcctcgcacagtagctacataaaagctctttttccccttcctttctccctcgaagtgcataacctctgaatccagatatgaggatatttcacaatgaagaggtccccaaaaagtattttattttattccattatcctattacaacaacttttcctggtatatttccatgaaatatcatgatctcagacttctctatcagtctgtgcccacctgcccactcttttaccctgagacctgcagctgatgctgctcctggcagctaaacccaaagaatgtcacacagagagaggaaagcagggaatggaaggaaagaagagaccaagaaagaagctctaggaagaatggggagggatatcctccaagagttgaaggttccagaatgaggaaatggatagtaaaaccccaacagctactcattagcttcattacccaaaggcccacaggcagacaaaaccaacagccaaataataaaataatcatagtttgatgagacggttcttctggtgcccttctccatcattttgcacctctttgtcttcttttgaggttcccaggccttcctcacagaagagtgggggttccacatcccactcccccacagcccttcctcacagaagagagattgactatagcacattaactctaatagtgggtttttgcattgtaaaacctgagaagggagagattctcagcaattaccaatgattttataatttcattgagtaaagctttttattttcattgagtgaaacgtttggacatggaggcaaactctttcgtaagtttcatgtcataatatttaagcttgtgttcccttcagctcttagcataggtgctggggaatgttgttttctaatctcctgatgtgaattcagaaaagcagtggttttggggcatatgatagctaggtctctatctcttcctgttcttccaccaaccctatgtcacactgactttgtggaagaataaccagaactcttcttagttttgtgatgtgtgggccagtgtggtttttgcaatgtattattcataactagcaaatcatgatttgggtatgttgatgtcatcagcatgaacaacctggtttggaagaagagccccatatttttcataacaccttggtttacccaacgtactgtgcactgtcatccacacgtaatattgatccacttgcgagaccagagcagtggtcatcagcagctcaggtcaagagctatcactgaatgttgtgtcctaaatcaggcctgatcaagagagtgactgagaaaccccacatacttgatcttgagaatgaatcagagaagaaaagagtaaactctgataatgatgactttatgtgggcaggaaaggggcactctgaggtgatttgggtgactcacctttggcattctgattgtttcacaggttgtgttaattctgccatcacattctcacatggcagaaacagcatctcccacaccacttaatgaggtttgaggccaccaaaagatcaacagacaaatgctccagaaatctatgctgactgtgacacaagagcctcacatgagaaattaccagtatccaacttcgatactgatagacttgttgatattattattatatgtaatccaattatgaactgtgtgtgtatagagagataataaattcaaaattatgttctcatttttttccctggaactcaataactcatttcactggctctttatcgagagtactagaagttaaattaataaataatgcatttaatgaggcaacagcacttgaaagtttttcattcatcataagaactttatataaaggcattacattggcaaataaggtttggaagcagaagagcaaaaaaaagatattgttaaaatgaggcctccatgcaaaacacatacttccctcccatttatttaactttttttttctcctacctatggggaccaaagtgctttttccttcaggaagtggagatgcatggccatctccccctccctttttccttctcctgcttttctttccccatagaaagtaccttgaagtagcacagcccgtccttgcatgtgcacgagctatcatttgagtaaaagtatacatggagtaaaaatcatattaagcatcagattcaacttatattttctatttcatcttcttcctttcccttctcccaccttctactgggcataattatatcttaatcatatatggaaatgtgcaacatatggtatttgttaaatacgtttgtttttattgcagagcaaaaataaatcaaattagaagcaata

SEQ ID NO: 204 - DNA, 242508 bp, Homo sapiens
gtccggggagagccagcgagcgcgcgggcggcgtagccggcctgtctgggccgcctcgtggggagggagggggcgcccggccgcccggcggcgaccccggggcctggccgccaccatgggcttcgagctggaccgcttcgacggcgacgtggacccggacctgaagtgcgcgctgtgccacaaggtcctggaggacccgctgaccacgccgtgcggccacgtcttctgcgccggctgcgtgctgccctgggtggtgcaggagggcagctgcccggcgcgctgccgcggtcgcctgtcggccaaagagctcaaccacgtcctgccgctcaagcgccttatcctcaagctggacatcaagtgcgcgtacgcgacgcgcggctgcggccgggtggtcaagctgcagcagctgccggagcacctcgagcgctgcgacttcgcgcccgcgcgctgtcgccacgcgggttgcggccaggtgctgctgcggcgcgacgtggaggcgcacatgcgcgacgcctgcgacgcgcggccagtgggccgctgccaggagggctgcgggctacccttgacgcacggcgagcagcgcgcgggcggccactgctgcgcgcgagcgctgcgggcgcacaacggcgcgctccaggcccgcctgggcgcgctgcacaaggcgctcaagaaggaggcgctgcgcgctgggaagcgcgagaagtcgctggtggcccagctggccgcggcgcagcttgagctgcagatgaccgcgctgcgctaccagaagaaattcaccgaatacagcgcgcgcctcgactcgctcagccgctgcgtggccgcgccgcccggcggcaaggtaggcgcctgctgcccgccccgacctccagccaggatccctggggacccagggccccgccccatccctttgggtacagggatgccccgagcttcccgggaacatccttgcttcctccctcttcttccactgcttaccagctgtatcactacttgcaggtcgctgaacctgcctgaggtggaacactgtggtcctttatagtctagacgtaaccggtaaagtatagctgtacagcttcagggattctggaaggacgaaaaagaattcacaagcaagtgtaggataagaatgaagaatgcagctccagagtcaaaactgcgttcaaaggctttgctgctcagaccagctaggggatctcgggcaagttgcttaccctctagaggtcagaaacctatagactgacacttaggagaggagagatggacacattgggtgaattgtatccgtgcatcctctaggattccagaaaaaaaaataaagggaacccacagccagtgtagattaagttaagaaggatatcagaagagaggcctctggggtaaaagctggatgcaagcgtgggctttgcagccaactagctggctgaccttgagcaagctgcttaacctctctaaagttggaaactatggtccctagagacgtggtatacagagtaaaaacacagccaggcacccctgaggtattcatccagggatttcagaaagaattaaaggagcactctgcccccaacaagtataaagtaataattaagtgtgagtcctctggagttaaaactgttttcaaatctgggctttttgctgaccagctgggtgagcttctggcttaattcccagatccctcagtttccctcagtgcgaaaggtttttgtcaggcttcagggagagagtttagtagaagggcctcgtactgtgcctggcagagagtaaataaatgctcaacaagtgttacctagaattatttttaacatctccacctgagcggtccccttgagcgagggtttactttgctccaggctgggtgctgcattcttcccagtcatttcctttttaatcaagtgaggttggtgtgacccttcccacttagtagatgaaaaaactgaggctcattaaggggcagtttcatgcctgggtcacagcttttgggtgcaaagctgcatgttgaacctttgcgtgcccatctttccagcccacgttctataaactatcatgttgctcctcagtgcaaccacaaggaccatttattgagtgtttattaagtgccaccaacaataggaagtactttacatgcattacctatgttgtcctttgagatgagggaacagactcagagaagttatataacttgtccaaaattaagtagtgactcagggagcagagccggactcagattctacctcagagttctcagttttggggcatattggcattttgggccccataactcttagttgggaggggaggtactgtgctgtgcattgtaggatgtttagcagcattcttggcctccctcccaagtcgtgacaatccaaatattgtcaagtgtcctctggaggggcaaagtcgcccaggttgagaaccactggtttccctgattgcagaagccacattttcaacagctgggtacttctgccttcctggggaggggcctgggcctgctgccaccgctctggttgcctgctccagatggtgtggcagaaaggggaaaatatttgcccgaggctcccccaagggcctgtgtctgctttgcctctctctgccctctcccagccccctttccttacgtgcacaccaggcctgcaagttttccgacctggccccccttcctggcccctggcctgtctgtcagctgcagtctcagcagctggccagctctgggcgaagggcaaatatttacagctccacagcttgcccaggacctcacaggcacacaaaagactggtgtgagccttcgaatcaccaaaacagagggcaaagcttggtcttcaatcaggcgccagatttagggtgaaggagttcccgagtttctgctgtttatgctgtcatctggacttccttcgtcgttttaagtgacgcttatttataaataagccattcactgccccagagtttatgcatcatttattgttgagctagtttattatttcttcttaactttctgttttctttctggagtgtttgggtaaaatctccctcagagtcaaaaatatgatacttgaatcaaaactgtggatgtttttgaggctctgttgagttagtgggtagcataaagaaggatgttaagcttagagacaagatgttgattttgaacttacggagaaaggtttgttccggtgttggagccctgcttggaacttttaccaacctcagtgccagccttgagaacagcaaaggatggtctggcccagaagctgccctagatagtttccctggcctcagacccagcctggcctcagctgaggccttagggaagcttgctgtctctccttgccccgaaattaaccctcagtggcccttactgaacgcttttgctgttcctgggtcaaccataaaactcctcccattggaagctgtttaagaacttgtttatttcattgggccggctctctgctcctgctgggtactgtttattctcttctaaaaggcagaaggatttatatgtcctggaaactctcatgtgcaacatttttattttctttttaaaataagccctaatgtttgcttctctgttataagctgaaggagattagaaacactcagattttcagtaccagctcttcagcagcctagaacttgcacaaatgatgtggcattctttaaattatcttaggtttcagtttttttgacacctgctgaacgcttagggtttgttagtgctgtaccagcatagacgttgtctcttctgttctaccatgtgagctatattaaggattctcaagccttagcgtgattggagtcactggagagcttaacacagattcctcagtctcacccctagagattctgatccattagggctggccaggggcctgatattctgcatttccaatgagctcccagatgatgctggtcctttaagtagccgctaagctagacgaagagcttacgctcaggtagatatagaccaaacatgtattggtcttcacacagttatggtttcactggtcattgtctaaacaccttcctaaatttcttaagaccaggataaaattttaaaacccagactgcctaggccgggctcagtggctcacgcctgtaatcccagcactttgggaggccgaggcaggcggatcacgagatcaggagatcgagaccatcctggctaacacggtgaaaccccgtctctactaaaaatacaaaaaattagctgggcgcggtggcgggcacctgtagtcccagctactcgggaggctgaggcaggagaatggcgtgaacctgggaagcggagcttgcagtaagcggagatagtgccactgcactccggcctgggtgaaagagcaagactccgtctcaaaaaaaaaaaaacaaaaaaaacccagactgcctagcagttaaatgacaggtaatcatagcctagacaggcatctctgatctcactgaggccacatctgagctgcagcagacttgggattgctacacttgagtgagttaaagagttctgctcccagcctcagtttcccatcctgacttaccccctgattcttagagcaaaagcactccagagcaaacatcttttttgcttttctttctgggaaaggaacaattctggacataactttccttggattgattgaaaaacttgagatacatcctcgataccttttgttctttaacctcccatccggtctgtctttgaatcctgcggattttacctcctaaatacattttgaatctattcacagctctccagctcactcaaatgaccaccgtggtccaaaccagagtttctgaatcagcactgccaacattttggaatggataattcttgggtgtgggtgtgttgttggtggtggtggtagtggtgatgggggtgggaggctgacctgtgcattgtaggatgtttagcaacatcccgggcatctacctacctacctactagaggctagtagcgctttccaagtagtatcaacagtatttgtggacattgccaaacgtcccttgaggggcaaaattggcctttgtctcagacactcttgcctggaccataactctttcctctacaaatcttcttgctcctcttcaattccttctttacctagcatcaggaattaatctcttataaatgtgtatcttttatcactctccctcaagcctcctatgctgtcccatttctcttggttggctataaggtccaacatgctctggatcctaccggcttccacctgcctggattcttctccccttcatcctcttctttcagcttctcatgtctctgagagtcgatgcatgtgcccctgagctcctctctgcctccaggcctttgcacttgctcttctgtctacctggaacaatcttaccaagtactctgcactaaataacctgcaaaatttccacttctctcctcttgcccacagcctttctgtctgcacttaggatttgcttatcactagacaatggttctttctattctcatctcagctgaagcatcactacctctaggaagccaggcctctcggacctcgcagactacatctggtgccctgagactcttactttggttatcctcctgcatggcatttatcatagctgtaactaaataagtggaagagtctgtcttgtccagtaccatgtctgtggcactaatccattgccatgtgcactgtaagctcttgatatgtattcatttggtgatgagttcaagattgaaaggcctgtcttggcagtcatcaaaacttttcaggttgctaaccaaaagtgggctcgtgtttaaaaagaatgagtttctccgtgatgacccagttaacaaaattgttttcaggtttaggggaggcattatttttgttccactagatccacccagatcaagttttataaagccccaaatcctagaaactattttgtccttttcagaactggaaataagtaaatctgatagacaattgtatcaaaaggtgttccagatgtccaaacactttgaaatgtatctgttagagtattcaccatgaagtatattttgtttctgaaaagctcctgcacagggccattccatagtatatctaacaaaacagcgcacttctgctaaaaaaaagttacagattgtcacttctatttcatttctgtgatttataaggaaaattaggatttgttttacaaatatgttacccagctacactggattaaatgagtataaccagacaatttgaattggcaattctgttgagatttgtctgtaagtggctctttctgtgttcagaaatggtgcttgcctcgctataaaaatatttgatgagtaagaatctatttataaggcaattatgcattggaccgtagaccaaggagcttaaaagaaaagaaaataatattcattgagttccactgggtgccatacacttaaggtgctttctgtatgtgcatacattatcttctccatgttcttcattagatagacctctttttttaatgggagtagcagattatgaaagattaaggctagaagttagattctaaatgtagagctgggatttgaacccagtgtggcccatctccgagctcacactgttaccaaaataagaaaagaattttttcctggggcggtgcccttctctgaagtctcacacaggctttcaaagcaccattattatgtatgccaagtactgtttggattggaggtgtacatgcattattttatttcatcctcagaaagaccctgcaaggtcggtgctcttacccatgactctttccttccattttacagatgaaaaaacagaagctcagaaagttaaataacttgccaagtgtcctccactggctcatgttagtttgcctgttggcttctggtccatgaaatgttttcatcccataccatgttcccatttacataggtccagtgtagagcacatggagtacaaaacaaaacagatcctggctgtgaaagagatttaggctgggcatggtggctcacgcctgtaatctcagcagtttgggaggcctagccggaaagatcacttgaggtcaggagtttgagatcagtctggccaacatggtgaaacccagtctctgctaaaaatacaaaaattagccaggtgtgctggtgcacacctgtagtcccagctactggggaggctgaggcaggagaattgcttgaactctggaggcagaggttgctgcgagccaagaccagatcgtgccagtgcactccagcctgggcaacagagtgagaccctgttaaaaaaaaaaatagatttagacaaaaaagagatgatgtcctggatggaatatgagaacagctctttaatttttatcctggtaattttaagagtggttaacagtaggaatgaagtgaagttcttccaaatgtattctgcagtttagctcctcacattctcatacccctagtgccaggccctgtggtaggcaccattggatagaaaggtaaaactgagcagctttaacccaggggatcaatcagacacccacatatgcctttgaaagcacaagtcttactattctttgctcacccaagcttttatgccatgggttagcctctgtctccccttgactaatagtgtcctaataagcctgttacaataagaaagggaagtggtataacataatgattactcttgtaaagaaaataactaccagatggacctgagcagccatctttctcactcattccatccatatatttacagggaatttaaagagcagaggcaccgcgtaatctttgtatgttgcaggccttgcagccaccccatccccaggaagggcagtgatgagcttttcccctggcatcagcagtgtgtgtgcagagaagagtcctgggcaggagatcacccctagtattttgctaaaagctgtttttaggtgccccgtgtctttgctgtgtttggataggtgagggatgaagtcccatcagatcgtgggtgaaggttagatgcaggcgttgggtccacaggctgactccaaggtgccctgaatagagctagtgtattgcgtgtggttagtatccatatcctgggatcagcaatattcgggttcatgtgttctctttgccctgttgttgagggcccctgggaggctcttctaaccttcaagccttaattgcctcacctctaaaatgggatcataatatgcctgttgttagggttgttattaagatgaaatgagatgatgtacataagggcacagtaagtcttatcaagcatttcttgactgtctattaagtgctggacacctgtaggattttaacattttttcaaataaatcactgaagaaagtttaggaatttaaagcagttgttatctagaagaaaagagattgttactcaataatttggtttcattgtaagcctcctgctgcccctgagtaacccattctctggatttctatcctctgtctgttttgcagtggtggaaatgtgtgaaagagggatattcaagttcatttgggctaagatgtaaaggtggagggctaaagcttatgaataacatatgggttacagagttgtttatgtttttcccacccaaattaacaaagctatggagagactggccagaaaaacctcctaccttcatgtaagcaagtgcacttatggttttttagatgagtagccttgctttctatcttagtctatttgtgttgacatgaagaaatacctgaggctgggtgatttgtaaagaaagaggtttgtttggctcatggtcctgcaggttgcacaagaaacatggcaccggcgtctgctcagtttctgatgagggcctcaggctgcttccgatcatggcagaaggcaaagactagcctgcatgtgcagagattacatggagagaaaggaggcaatggagagagagaggagagaagttccaggctcttttaacaaccagctcttgcaagaactaatagagcagagctcactctctgcccaccaccaccctgggacagcattaatctcttcatgaggtgtccacccccataacccaaacacctcccattagaccccacctccaatgttggaattagatatcaacagagatttggggggacagtcatccaaactatagcacttttttctttatttagggaagaaaatgcttctggttggtaattggatgtatacatttgaaaaccactctgtcttaggccatttaggctgctgtaacagaaataccagaaaccactctgtcttagtgcatttaggctgctgtaacaaaaataccagaaattggatagcttataaacaacagaaatttatttctcgtaattttggaggctaggaacccctagatcaaggtgctagcagattcagggtctggtgaggacccacttactggttcacagatggctgtctttctgttgttgtgctcacatagtagaaagggtgagggtttctctcttgggcccctttataagggcactaatccctaatcacgtcccaaaggccccacctgctaataccatcactttggggattaggatttcaacatatgaattttgagggcacataaacatttagatcgtagcacaccccataagtaagtggaagtgttaagatgctgtaacaccttaaaggtttgttggtgtcatttttggtgaagcattgcttgtggttgttcaccagaaaagcagatgagtcagtgacaaaaatgagagagaaaatttgaaatcaagctcgtggaaataagaaattagacatttatggattttttcaggttgtgtaaatatagtagcagacttttttaaacgaggaaagtactgaaacgtcttctcatattagttttcaaaaatatctcgtttggcttaggaccatgtgaactattgtgcagatattatgactctggaaaagctcttgtttttttttctacctgttcccccatgccctttgtctcccttcattctctctacacctttttctgatgacagaaacatcctattaatacttttgttgagtgtctcatccaatttcaacttaatttcaagcaccgtccttatgactaccttcagtcttaggctttggaacagtttcctcttatgttcttctgcaagaatcacttccttagagctgggttgaattacaaggcagggctggtccaaactgcttcaccattaagaattttaaagttttaactacaaagaggacaaaagcatctgagcatagggagtgaagacatcagcaattcttcagtaaagaatttctggcagccagctctacctcttggtcccctcaactcccatctctgcacatttttgcctggaaacagccaaatatacagtgctttcatgtcactagtcaacagacagagctgtttcccagctgtgtgaagactagtgagtctttgtgaactttgcataatctgaggctgcgaggtgttacatcacacagactagcggtcagtcagttacatttctcaaaacctactgggcagctttccagtctagccagttctctgctgtgagtcccacaacagacatcattagggaacacctgtccttaggcagaaaaggagtttttaaaaagagtccacattgacagtggcgtggatggaccctgtgaaccaccacactcattaggagatgtcttgtgtccaagcttttgaggctggatggtttggaggagaatggtgacagagtaatactaaagagaaaagggactttgccaatagatggttcacattcttggatgcttaaaaaaatgcagcctcataagatgtcattttgacattcaaattacattcaatttttgattttccactgtgacttttcttcccccaaccaattcttatccaattagaccttgagttgaaagctgagaagattatttggggtaattttaacattgatctaatagttacatgttcaaatatgatagcaaagcttcttttaaacaaaatcaactgtatcttcttgaaaagtgagcttgcatttctgcttgtgacttggcttaggcactttggatggttcatgtcagtgttaaggtctggatacccacaaccccttctccaaggttaatatgtccctgctttttcttaatcctaaagacctaagcttctcccagggagatcctgtgttgcattaggggcccagctaacctcttgaattgggtttgggtgggggctggggtcctaagtatctgatagagcttcctgccaagcccaaggaaacagatgtcactgggctccagaatatgaccagaactgcccttctgcaccctgcatcccaggttctgttgagaactcctcagtcttcagggtcggggttactgaagggaagagacacttgccctctgggaagagttactgaatagaaggcaactctgtgaaagctgccaagaaggtgccactccatttccatttgttgtttttcctctgttcttcaccttcttttcgtaccaatccatcgagacccactgatatggtagaacttggagcagtctgtagtgtgtagcaatccccaagtaccctgtactcccagactccccagctcgtttctgtctccaccgttcctaagttcaccgtttcttagtcttgatgtttctcctatcctgttgtgagccaaaatctgtttcccttcccctttgctcctgtggccatccccttccaggtgtgaccatgttatgtatgtgatttccccttctcctggcccacagcccacttggtcagtatcatctccctgtcatatctgtgctctactgaaagtccaagcggagctgctcccctcgtcttccttcccatggctcctcccaccaccttcagaataaaaattgtctacctggtggtcactccactggtcccctaaaatgtgccactctttttccagtcatggagaaagatagatacagttaggaatatataatgatatttatttacttagctttcaggccccagctcttccaaacttgctttagcctaagttaaagtgagattaggcattctccattgcctagattttgtagaagagtaatgtatgtgggaaaagagcatcatgacctcggtgttgaactatgtgaatgtccagcttaacactgtgccttgtgttttgggtgctaattattggccagatgccatactgaggcagtctttgggtatctgtctatctcagtcatgcatcctagtaacctggtgacatgagaactggtgacatgagaaggaaccattatcattccctttctgtggatgaggaaacatcacaggttctgactctgatgttgcgccaatctgagattcctgaagacatcttaagtccagccctgaactcagagaatctctctcaagggacaattaagacaatgcccaaaacacatttctcagccagacagcatcttgcaaagaatgtttttgaacaaccaagttcaccttctctgcttccttgccagatgcaatggacataatggtcccagaacttaaccattatgctgctcctgtcatggcataatagtcttattatacttttcagggtataatagacattcttaatctttgcaattattattgcatagtccaaagaagccttacttaaaactctaattgccagatgaattaattgtctgatccttcatgccaggctcagtctttggaggcagaaggatttagaacagggtgcaaacatttaccagcacagtacaaagatcgtaggcaccagagtcacatgtggacctgggttccaatcgtgaccttcccactttgccactatgtgatcatgagcaagtgtctgattttccctgagcctcagtttgtccaggtttagagcattgatacaatgtctgcttcggaaggcaagtgtgtttgttggcttatcagtttctatgaagttaggctcatttctctctttgttttactatgttttgagaccattgcaaatcatgggttatgataaactacccaaacagaccaatattggttaaattttcctgtaaatgaaagatgctgctgcctatcacagttaccatgtctgtgaacagtcgggaaagcagcttcgataagagcctttgcccttatcccatttacacctcttttcaattggtgggatgtaactgaatgataattatttaagtaccctctatcctgaagcattttgaccctaggaacaggttaaatgggtaagcagaggttaatgttaacatgttaaatgttttatatgaagactatctgtttacaatctcaattaatacttcttgtgaaaaattagaagttaaactaaagtagttaaggttgtttgtggagaaaggagtgaaaaggaaaaaccagaatcacgttgtcaaagaatagcaattaacctttggtaattagttggagaaatgaaaggaattcagcccagactgaacattttcttttatccctccctgcatcctgtgtcgaatcttctacatgttgctttactactgtaaatcaactctaaaataggcaatgcagcctaaagccaatgtctgacacttgtggacagtagactagatcaagatgcttatagaaaataagaacacccttgtttctccccagcattgcatctggcaagaaagcatagaaggtcagcttagttgttcagaaacattctttgcaagatgctgtttggttgaggaatgttgtatttcagacagtgtcttaattgtcccttgggagagatctctgaggtcagggctggacttagatgtcttcacacatctcagattggttcctttggagataaatagttcagtaaacagtttggaattttgttctgatactggcctcctgggtaagccttcctttgataagttcttttttggaatttcaacaataaaaccatcttgaacaggacctaagatgttgctaacccatgtggaattattttttatattctacacagaaagagagtagtatagaagtgtaatgaagatgtaggattgggaagtatgggtctgaatcccagctcaacattttactagctccttagcatgggacaactttcttaatcactctacctcagtcttcccacctatatcatgaggatggtaatagtgcaatttttaagattggttggattaaaaaatgaaataaagcattttattgtcagtatagtttctggcacatagtttgcagccagtaaatgttagctgttatcattgtcaatgcaatgtaataagattattttcttcttctttttttcttgaataagtggttatcacacagtagattgaagaccaatcttttaaatcatatgattgtgcattattctttgtgcatcacttgagattgtcaaactaaagccatctgccttggattactgtgtaactgtgcagtttctatcattgattaattatgaaagccagacatgtaagatatgtaagataacttgccaaattcccatgtatttctaacttttcacccctttaagatagcaaagtaagaaatggacttagtgagattttcagcgtcctaagtagaaagacataaactgtttcaatttgaaaatcatgtttatatctcaaaactattaggttgattctggattttcttttagagcagtgaaagttattgcctattaacttgttacagttcaaattggttataaagagggatagtgttgatagatgcttttgatggtggtgctgtttgtcagaacattttttaaaaaccaatagcctgtcattaaagaggctctgctgttttttgttgggtacagtaacttgatagagactagcttcttttttatatataattctgtattttatatattgagtaagtgactcttaagaaatgaatgctgtgttgtccttataggacacctagttctttcatcagaaacagagtatctttttctcagaataaattgtcatttttgtttttacagtgtatttctaattgatgttgaggctcacaagaaagttctgaaaatgtctttaatttggttgtataataactactcgtgagaaaggggttgtggttattaagactttaagcatggagataattctacatggtgaagcccattgatctttcgtaatatttttttagctctactgggcacagttctcctggcaaaatgtgaaaccagagttgcacattgacagccatagcaataaatgaagcggtgctccagaaaactcacagggcactgcaggtagaaacagtactttcctttgccagtgtggttgagtcagagagttgcattcatgcctttccaatgtggccatttatttccccagaaaaggtagaagacaaaagtttgaacagaaagcaaaaatgtcagagtaaaatctctcttgtcataagctgtcagtgttatgtttaaaacagcttattaaatattttatatttaaaagaaataccacatttgaatactaccatgtttaaatagaaaacgttaagtgaagcaaatgccgatttataggcagtacacaggctgtgatgttttgcatatcatccatataattgaaaactgtcaaaggtgtatcagcgagttgaatgtttatgtcaaagaatattacgtgacagttttcacataaggttaaatctatttttatctgtctgctgtcacttgagagtgttagttgagaacactctccctggcatctctgttgcctttgactgtcgaacactatgctctgtgacctgcctgggtcacttctacttttttgatttaaaggtcacattgaccagccttaaacagagtgctttctgttaaacagctctgcgtctcgtgtggattggacagtaattactttgtgaaaatgccccctcccccttttcagtaagattcaggattttttgttttctgtgtgtgtttgcatctcacttttcatgcactatttttccccaagtctcccaaacagagatggctattgatgggccatgcatgcactcacacttccgaaagaattgctatttgaacctttcatgacatgacatgaatgctgctgttgagaatggttgagaaacaaacagaaagtagccgtctagacagcctgcgtacgatgggccggtcaaaagaaagatgcatttgcagaccaaggtgtcattcatagaaaatgttcattgggcatgtctggacatctccagacattcttaggtggtcattccagggttagatggtatctagaaatgtttataagcccttaaacacaagacagaatttcagattgggttccagaagtttccttggttaaacttcccaagagataacaggatttgtaatgattagctgagtagtccttgagtacacttagatagaaggaaaattcctaccatctattccctgttggtaaataaaagtttgatctcatttgttacctgcagggcgaagaaaccaaaagtctgactcttgtcctgcatcgggactccggctccctgggattcaatattattggtggccggccgagtgtggtatgttaattactaaaatgtgtttttccttttcctggtgtagctggaaagagaggtcaaggtttgaaggggacagtgaggagcaggaaactttgctcacttcattctgctctctgtcattagagggttcattggctgtctaacatcttcacacttagggatttttattgcgtagtctcctaaaacagcattggcctagtaatataacagctaatttaaactgtttggttttgggggtgcatttctttttttgttagggggtacatttctgtttgtatagcagttgggctgaatgaagttgcgtgagatgtgtgcagttggaactgggtaaccagccaccgtcctagaccgagctggagtgtggtgctccagactggaagcctgatcttgagttctgctctgtcagctgttcattagtcagagacaattctctaatttgtgggtgactgcatccctttgctttctcttcccactgcagctctttgaccaccacattcatcagcagaccctcctctagaaagaagaggccgaattcaaatctgccagtttaattatggggaaaatgttcaaagaacgggctccagagagtagcagtggatgtgtttcagaatctcacacttcaagggggattatctgaatatgtcccatcctttacccttttcttttcctgaccatctccttgtttattagcttaaaaggaaagtagttaaaggaaaagaaaacaaaaatctttcattcaacaaataagtattgaacataggctgtttgctaagggccaggagatacaatggaggccagaaagactgaggccctgtggtcattgagtcctggtggggatgtcagacaagaaacaagtgaatacaataattagagattggattggaagaagtatgatgaaggaaaaaaaaatgggaggatggcacatggcagataccagccaagaagcaaagggtatcattagcttgggttatcaggaaagacaagaggagatagtagtaaacagaaacctaaaggacgagaagatgccagccatccagataggaatagtgtgtgccctgccctcatggagctcacctccagatggagagactgatgagttgggagagcatagcactgctctcattgatgtactctgtgcctgcccacagctaatgatgccctgggatgagttaaccctgcgggaggaggtgtcctggggaggggccgttggagctgagttcagaaggttgaacaggaatttgctagatcagaggaccatattttatttgtatatataatgtgtacacagtaccaaacgaatacattatgtgccttataaaaagttacgtacaaaagggagtattttaaataatgaaattaaaatatgactatgaagaaaatgtgaagtatgttctcctgccattccaatgcattgtgttacacgcattcacctgtgaagacccctgagctagaagaaagcggttggacgctggggttttgcaggggtggggattggcgctcatacaaggcctggagcaggaacagagttgggaactgggggagctgcaagtaagcagagtgtggaaagagttgagggatgggcagggaagtggccagaaagaggcctggtgaagaaaacaagggcttgaccccaaagggcctaagtcttgagtctgggatttaaattacctagggcgggagtggccaacacatggcttcagttgaagggaatgacacaaagagatttatgattaaattccctttgcttttagcccattccacagtttcaaaaagaaacaaacaatggcttattataagaaacaacaacttaattatgtgtttgcagttgttaaaatgatgaacattatctgtcttatcaaacatacatataaaaaagaacattttaaatggtgagactaaattgtaaatatgaaggtagatggggacagggataattcccactttattgagccccagggatgtcatcacatggttgtatttcttgcattcgctctgtggaattcttaaaaaactatagaaccgcgtgaggttggtatatttttattttttccttttaccagttgtctgagatcccaggctgcatgtcatcatgtgctgttctgatttagtccttgctgccaggggtcctccgtactctccagccttcggagggactgagggagcaaactgcactcaaatatctagacatttggctccaggaagcagcagggtcagacttgagcccgtggttcagaacatgagcccatgttctacaacttaccatcaagaacatgttttgccatttagcacagatgagttggctgttccttgtttacattcataattattcctccaccctttgttaccagttttgagaaacaactttaataaattaagattcacttcacaattaggtgtttcacaagctatagcaaacaaaagaacccaaaccaagaagacctattccctgccccaggtctaaaccacaccaaagcctactgttggaaattgctcaaaatggagaggcctgtggccaagtgattgttgggaaacctactgtgttaaagccagtgaagatggtgttcagtttccacactcaccaggtgcaaaatgacattccaaccccactggaatacagttcttccctgtgcttatcaaagagcatgtctaagttattttctttttcttttttacaaaaggtgctttaagtacaagccagacctgattttgtagcttgcattagtattttcaatttatgtggtctttttgcaagaactgcctgcatggtccccagaggaaaatttaattccatgtgcatgtgtttgccatagtgtttttcaaaatttgccctgattagcagaaatagcatcatgaaacctgaatgtattctgcactgttgcctggaaaatctggcaggtcattgagtacatgctaaaaagccaagatgagcaacaatgcacacacgttgttagttactagaagaatacagtacaaatgatgtctgtgtttcccaaggaattcctgtgttagatgcttggttgggttgtgaaatagcccagccatagctctgacataaggcttttcattgcatgatcagtatgcaatactcttagcaaaatcatatcattcatttgttagtcctcataaccctaaagaaacagcagctagtctgttgtatcaaacctctcacttaagcctttgggaagtgtactttatcgttaggtacccttgctatgaaaacaatcccctttcatttctctcttactcaaggcagcaaaacaaaataaattccaagtcatattagttcaccttgataaatagctgtaactaactctcttaggagaggagccaaacaaactaagaataaagagatgccttttaagagagaaatctagctttttttttttttttgagacgggggtctcactctgtcacccaggttggagtgcaacggcacaatcttggctcactgcaacctctgcctcccaggctcaagccatcctcccacctcagcctcccaagtagctgggaccataaatgctcggctaaatttttgtattgctagagatggggtttcaccatgttgttcaggctggtcttgaattcctgagctcaggcgatccaccagcctcggcctcccaaagtgctgggattgcaggtgtgagctgccatgcctggcctgctttatgtgctttttgcatccttccccacccctcaccactgtctcagtttaatctcactgctggtgtttgttcttgcttcttcctctctgatttttgcttgaactttctagtactccttaagagttattacttatgtgcaatgtggtattttgcaaaacaaacgaaagccaaaatcctatcccctatctccctctttctctccagccaagaaatgcaaagtggttaaatcagagtaaacacagatctcttttcatttgatatattgacatcacctcttagggaactcaagcttgttcataaatcttttgtggtccattgagactcttcaagttcatctagtggaatattccatagcctgaaatgttggacttctgaattcctgtgtgttttgagttttctcagtgggagacaatattgcacacagagcatgtaatgtgcaagaggatccgcttcgcctcagtttgaaactgagccataccactttttagctgtgtgaccttggatgagtttccgaacctctctcagtctcaggtttttcacctgtggaatgggtaataatagtacttaccacttgtggttattgtgaggattaaacagtgcacatagagcactcactatgtacctggtacctagtttgtgctcagtaaaggaagctgctttgcagctttatacatatatttcaggtgtgcatgtagggagctacacggatgtgttcagactagtgcctcagtaaggctgccgtgagagaggaaggaggcacagaggtattcagatggtaaagggttagtgtgcaggaggtctgtgcagagcactgtgatgctaggcagggatgccttttgaggatagatgatcctacacagcacccacaggctccctgacccttctcttggaagagcgttgatggaatccagatgccagttagagacatatctttgtcatgtggggataaatgtcaggaaaaacacttaatgctcattttaggttgtgattttggtttcttttggtgaatcatataacattttactctgtgtgtgtgtgtgtgtgtgtgtatgtgtgtgtgtgtgtttggggaagtgtgaagaaggaaggagagaaggactgagaaatgtacatttttccaagcttagttattgctgttgcatttgaaggggtagactgaatcacacttgaagtcgtttccttccccctttagaatatagggattgttttttggttttgttttttgctgtttaaagtggaaaatgttttatttgaagagttatttttaacaaatggaatttttatgtatttgtattcagagtaattgttattgaaataaatcttctaatgacatacggcaaggaatttaccatgactagattttggagtttttgtggaacattctgagcttacatttcaaatgattttgtttggaaatatcacatgcttgtgccatttaatttataaatccatctgttaatcactagaaatttaatccgtacacttggagagaattcattgcagtgctgtttgaaaagaagttcgtgaacaagctgtgagggttttttatgagcttgttggagccttttgattttaaggaaaggaaggagtttgaacagtgagctgtcttcgttcccagaaagttttagttctgacatttaattcaaagatctaaagagattcaaggaggtcagagatcagaatttattaggactagagtgatggtagtgcatcggaacaaaaacaaaatatctgttttcacagtcaaattattagatatttacaagtttaataacattctgtgcaaatgaggatgtgggaaaacactctgtctaatgaacaataagtataaactctctgaaaagccatttggcaatatctttgaaatgtacatatccttttacccaacagttccattgttagggatttgccctagaactataatagcaaagataatttaaaatacaagtaggagagtattatcacagcattgtttaatcacagcaaatgaaaacagtgtttattagcctcatgttggatactgttcagtcactttaagaagtaaggcagacacgaattggtagcagaagatcttcatgatttttagagttaaatgagagaggcaaggacataagagtcagactagcataatcacatttgtatgcaaaaaggaacaaatgcatatttaggaatatgatgtgttaaaatgttttcaaaaggatgcataaagtcaaatagctaccataggcgggggaagaaggacaatgggttggagatggcagggatgcatcattttatgtcctttggtgtggtttgaaatattttactgtgtgtgtattttagtttaaaacagaaattaggagaaacaaataccttttaccctattgccactcttgacacagcaagagtcaattactgttttaagagtgcaagctttactttcatgctcaacttaatgcctagcattcatgcatgtttttttttttaacccaaaggataaccacgatggatcatccagtgaaggaatctttgtatccaagatagttgacagtgggcctgcagccaaggaaggaggcctgcaaattcatgacaggattattgaggtatgtgaatactggccagtgtctttgaataggctgaatgccatcccatcttcgtctagctcaaagcaagatgtttgactggggagggaggcctaaagtggtagatggttgagcgggagtctcacttttcccattgtgtgggaccagattgagtgttgattgccttggtgttaaatttttgttaaatgtagaaaagccagattatgagtggaatgttcacaatttggcttttttcatgtggacctcaatctgtttcgtatgcatcagttacagtttcgcgcgaaaaccgttgaagagttggatgttagaaccagatgaacgaaccctgttgtacaaattgtgcaccctgttcatattgattaccagggtacaattgtgtcagctttggagtcattctaatgtcctcagagctcacacagcacacacttatttctacaaatgcattgttctctctgttagtttgtcgtctttgcctgttgttagttgtacaacctgattgcccagggatttgcaggcagaggttgatattagggttcacatatcatcacttactccattttcagttcgtcattcatcatttcaaacttttatacagcaggtttgtagactcatgtaggggaagtggatctctcagccccaccagacaacactttgtaacagggttgcagtgttctaggatgctctgagtcactaaaagggagagaatgatttgttgccttctcatatgggctcttgttgcaaagtttgatataaatgagtaattttttactggtgttttgaccattttcatagctctttggatggatacacatatgggctaaattgattggctttcctattaggcaaaaagtaaatttgagaatccacgatgatatgccagaccccacaagaaattcacccatgggccacagccgtaatatagtgcaaatagaagaaaccagaaaaacagcaccgataccagtgggtgtttgttttccacatgcatttttatcatgtctgtatttcctgagtattttcatggcctatttcaaaatttaggactgagtgggagctaggaccacgagctaagccataagtgaagttcacatcactcactggaatgtggccacaggcttctcctggggaaaggagcctcagcaagacagagaacaaagtcttgcatttccagtctcatctggacacattctgcaacgtgcagtatgcttcaggataatttgtaatcctcaggaaaatacacagttaaatctcacagggaaagcaaactgaactagttagggtgtaaggctccctcctcggagggagtgtgatgtgctaacttacatgctaaaatgatacttgattttgttttaaggacattattaatattgttgcatcccctttgaatgtttgaagggttcttaaacttggagctttttttgctgcatggtttagagtcagtctttgtacttcccaggtcaggagactggattttccctaacaggaatttgcttgggcaagagtgctttcttaagagctcaaatgcgttacttactgtcttttttgagagtgaatacattttctgagactattgttcaaaaagataagtacagcttccgttgccaagggtttggtggaacagccagtttctctaagtaatggaatttcattgctcttgtgttttgcaaatgagaaatctacagctgggcaggattttctcttggcaaaggatgatctgtatttgaaatgttgagtacggtttctggtaagtcacattcctattttggacagtatgtaaaatattaatcatgtagtgttgagatggaaagaaggatgaccacaatagagaaacgatatatgtataattgcaattgacaacactgtgccttttgcagtcaaattctaatctcttttgacatgatacagtgattcccatgactgaaaatatgttctctggtttacctcatctgcgtctgagtttattaccaggaggcataaatgtgattattttgagagagagagagagagagagagagagagtgtgtgtgtgtgtgtgtgtgtgtgtgtgtgtgtttcattactaagaagagtcaaagtctctagttttccaccagatgtcttctttttcaggggaatgggcaaaccaccaccagatcttcaccgtaagacccttaattcttgcaaaggggtattattaaatccagagatactaattgagtcttttctttgctgcagagttcctctgctcttaatggtatctgttctctgagaccagagcagcggctcttacccacatcggtgccagcccagctcctccctgtttttttataagaaatattttggaattccaccaatactgtggtgaaatgaaatttacaagtaacatttatatgcatacatacacaaataattgtaaaaatatataggctgttgcataaaagaaaatcaaaggaagataatttataataaaatatatcaatatgccagtgttctggcacagtgacattagataccatggcactgtcagatgctctcacatctgtgtagactcactgggatgcaccttatgtggctgcagatgctgccagatacaagaggcatctgctggtggcccaggcgccatgaatggccttgccgtacaggatgtgaatttccatggtagtgaacaggtcatggttaaattctgacacaggcaactacagtgttgctttgatttatacaagagttgcatttcttgaaatgtccgtgtgtgtatatgtatatatggcaagacatacatgtggcaaaatatacataacagaatttaccattttaaccattttaaatggttatgcagtggcataaactacattgatttatgttgcagaaccagtaccaccatccatctccagaactttttcatcttcctcgactgaaactctacactcactaaatactaactccctccccacctcaactcctagaaaccaccattccactttctgtctctaggaatttgatttataaacggaatcatgtagtatttgccttttgtgactggcttatttcagttagcataatgtcctcaaggttcgtacatgttgtagcatgttataattttcttcctctttaaggctaaataacattctgttgtctgtatttaccacattttgtccattcattcacccagtgatggacacttgggttgctttaaccttttggttgtcttgaataatgctgctgtggatgtgggtgtacaatgtgtgtatgtttaaactgccaaaaactctgttgtgtttatatgtaaaacagagctaggtctatgctcaggtaattataaaaagcttgttattttatcttcatgactgtctggtgggatatgtgatagttgtgctggaggcagaaccattcttcattgcaggagattcttcgtgtcatctctggcacatacccctattgttgtgatggtgaaaaatgcccctgcagattgctgaaactcccactggggagtgacagggacatcagggacaatcactgaggtagaggtttgacttattccaaaaccttgagataggaattgagttgctcagggacagagatgtcaacatccctttcttccagctagactgcctacatgatgtcccctatttgggttccctacatgagtgctcccaaggcctggtaagaaagcctgagctggcctgtcctggggctgtggctgggaatctggggcccccttagatgaagtgcccttccagcccacatggctgcagggcccatgctgtcccctggaatcctgtgtgtccatctgccctgggcttgttgggcagactttggtcatacctattccatctcacatttggtactaggattcagcaagttctgacttactcagtattggcttctgatttttttgtgtcttccctgcactcctcttacctgtgagctgtcctggtcctttttacaacttccgaccccacctttgattgcatatacttattgcagttagaaaactaaatttaatttctccctgatgtctttaatattcattcgaaactgtaaatatctcagtgccttttgtttttctgcctctgaacctactgtctgaactatattttaaagacaatgcaaggttcctatactttaatatcaccagatttcttaaaggaactatgctcatattctttcaaatagtttgagaactttggaaaaattttcccagtgcccaaagtgtgggttatccaactgaggcagatttcctcatccacaaacacaccacctttctctgtggactctggagtctactttaggccaatcttactctactgaaagttatttaggagaaggcaaaaatgtgaaaaatcacataagatcaatattaccctcaaaattctcttagggatgtgacacgtggagaacataccatctcttcgtaagtccagccagctggttttgcacagcattggatcacctcactgtttctcagttgactgtcatatggagtttttggattgttctgtgaatacctcatttgacaaaatgctcacactgagaaaacaccgagaaactgaggcctactaagaaaccagcaaattcactttgaggcatgtgctgttcaatatattatttctctcttcatcttttttttttttttttggtcatggcttgcctataagttaaacactcctctgatgcaactccactgaaattctttctcaaagacttgtagaggccatccacatctatatttcttgccagtcttcaagccatatggcttggagaaccaagctcatttttgtgttacaggaggcttgcctttggtgataaatgagtctgtgtagtgattgcgtgggttaaacgctgttctgctttgagctagcaatcttgattccctggatccaatgaaagtgggagacttaagccctctattcccaataaccattatttcgtacaatcttctgtaaatatgcattcatcttgcaagtgttatgatttgaagacccgaggatatgattacagaagctgtggaacctcaaaggcttttgtgtaaaccggtcattctctttttttgtttatttttggtttagttggactgtcattgctaacaaggtttgttacagggtcagctagaaaggattagcaatgctttccctcccagagccaggctacttggtggaacaaagtgagatttcactgcttgtgattattaggtgagaagatactgttctgagacccactaaagttgcaaaatggaatgtgaattaagctggagtatttatttaaaaataaagtaatagaagactcccctttaaaaaatgtttcatttcgacataatttcagacttgtagacatggatttctgtacaccgttaacccagattccccaaatattaacatctactacatttactttattcttttcttcctctactctttatcactaaattcatcagtgtgaactttttaggaataagacattctcatatgtaacagtatggtaatctaaactaggaaattcatgttggtacaaaactgttatctaatcttcagaatttattctgatcttgctaatggtccctatgatgccctttatagcaaaataaaaccactgtcatgggttgtattccattttcatatttatttagtttcctttactttataacaattgctcagtttttgtcttccataccattgatatttttaaagactccaaaccagatcttttctggactgtcccttaatttctgtttgaagtttcctcatggatggatccaggtcatacgttttgggcaagaataccacagaagtgatagcatgtccttctcagtacataatgacaggtctcacatgaggtgaagttgtccctttatgttaacttgaaccacttggttaaagtcgtatctctctgtctccactataaagttaccattttcttctttataatcaatagttatcctgtaggtagatgctttgaggctatgtaaatgtcttgctactcctcaaactgtcacacactggttttatcatccattgactgtgtttggttgaatctgttattgtgatgattgacaaatggtgatttttctaactccaatccttccacattagttgactttccgctataagaagtagtattcctttttcccctatttaatctgtttatctgtctgtctcttcctctgtcaatatggactcatgagtttttataatttggtggtcacattgtcccaagttttggcccaatggagctctttcaggcttttaacctgtgttattttgacatgttcccatcatgttttgagcactttcctacttcctggcacaagatactccaggttaatcttctgtccttgctccacttctgacatgtgcatttttttcaaggacctctagcttcatttagtggagaatagtgtttagaaaccaaaatatgggtgctagggtgctcattatgattgagatttcattgcttctaggcaccttcagcagatagagctagaaaatgtaaatatgtaatataaacacatgtacacatgtaccacgataataacatatacatctgtctttctgcattcatccatctgtatatcttggaaactatgcctatatcaatacctctaatttcagtccaagtcagtttgtaatccagtttgtaattcctagaggaatcctttttaaaatactgatccacgtgcttttttcctttgaattaaatctgtgatctttgcttagatgttatcagtgaattaaaaaattattggtgaaaattgtttaaagtgttttaatttttggtttggttttggagaaaaaatatgctgtaaaccaaatgattttgtaattatatattttttcattttctttcatttctttaagaaagacttgatatttcttgcttaactatacacaggaaacttattttgctaaacacacacagatatgcataatccatttttggttaatgttagaaataaacacatgaggctatactcctctccttcacagggactgatccccatttaccatattcagcagaggagtatgaaaagtttgatagcagttatccacttaagaagtaaaacctattcatgttatttgaaatctctgttttcttggttacccaaatattctgttttgattaaagaaacttgatataattcaagctgcgttgagaagattctttgttagctgcaaaagtaagcagattttagagatcagttattagtaatggactccaactctccgtttccaaaggtggaagctagagtttcttcttatatatcaatttcagtatacataacgacaatgacatcaccttggattatggtgtcaaaaaattctgaggacattcctggattgagtggagatgagcattgtgatcatttattgatgtttgtcatgggcacataaacaaggagaagggtgactttttgctgtgtatttgctatctctggatagactcacttaaatgatgtttttggaactattgcattgtcatttggtagtaatgactgtcttttcactagcatagctgcactctcaataagtcagtacatctccatctttttagtctccacttgtaaaataaagtgaatatcatattttcccctctcttatttcccgatttagccacttttatcacttttgctttaccttaatagtctttactacagcaacagaagactctaacacaggtaagacttctctgaaatgcagctgatctccttactattagaaggaacatgttgaaatggaaagaaccatttagatttaaatcaggagacccaggtttaagtctccacccaggtattcactctggtgttgggattctaaatgttgagtcttcatctctagaatgggaggagtatttactgcttgtctttcctacctgtcatgctatctgggtggaccaaggaaacaatgtaggtaaaggatttttgcaattaagtacaaaggtggagagttgttatttcaagttaaaatttttgtacaggatacgagaacttaaagccaaatatagaagttaacaaaaacttttctgagatctgttttcttcttgtttatgtatatcagcaagtatgtggagctgctatagaattattgagaaaatcttaacctatttcatggagacatactttccagaattaacaagatgaccaattaaaaacaaatagccctcctttagtccatggttgccttaaacaatatattatgtattaatttctttctaatgactgtgcatagcttattgtgtggtatatgggctttgttatatttattactgtcattattttccttattttcctatcaaaactagcctttcagtgaatatctttctaacatacatcactttatactagtcagataaatataaaactcaggtgaagagtggacagtatggagtgctacaactcttgcagaatttagctagcaggtttttcactttttactagaaaaaccagtagaaacaaaaaaataaaacatggtatgatgcaatttgtttatttttaaggcatttatattagtctttgcaggggaaaaatgctctgagctaatgaacagtttatagttattgtagttattttgtttgatgggattatggggaactttaagtaaagccacatttctgtaatgttggagttctccaaagtgtgtgtgtgtgtgtgtgtgtgtgtgtgtgtgtgtgtgtgtgtatatttatttcggtaaacagtaagaattaaaaacttggtaatttaaaagtgtcttttgattttaaatatcacaaagtggacacctgcttatgtatttccttttaaaagtcacttaacattctcatttctacaagctcatagcatatggcgccaggtatggaaacgcagaggcatctgtctcctgctgaaaccctgcagtcaggatattgggtgcttctctttggcagagtgtctctcccatcctctgtccgtgttagagtttactttgtattgacattatgtacttttttgggagttctgactccacagaagttttaaatctgtccctcaaagtcttcctttcataaaaagatttaattaggtaatccacaaagcattttaaaatgaagaataaattagaagtaaccaatgtccgcattaaattcttgagtgaagattaggtcaaaaaattaaatcttaggtaatttcctgaggaccataaaacaaaacaacaaattcttgacaataatacaggtcaaatatattttatattgtcatctttacatgtgatatctagacacttatctttaaatatgggggttttgagagcagtaaccttatctgttttttttttttaaggaagtttttgtcttttcatctgttgctgtaacacaaaaagagccagatgcatttttattcaatttggaaggtgtgttagggatgggctgacttaaatgctaatctgtgaagtatatgtaacatgagcgagcgctaggggaacgcttcaaagcagtaggcagacatcattgtggagctaaactaagcacagtgcctatagaccagggtgctatgaacaggcggaaagagtgttgacaatcagaaattgtcaatggtaattgcaaataggaagacgcaagggcagaatggcagctgcaagcactgatttgcaattatgccactttcactgggaactctgagtactccagggtgggtagctgctgcagcttgctttcttctaatgaggattaatgattactttgagcctcacggtggagagcagctggtatggaatgagtctgccatgccaagtgccacagtgctcagtggagacctctggctcttaccctgtttaaatctattttgatgaccacgtgaactgcatagaaactgggtctcaccccttttctcctgagagtggcactcccctctgccctttaggctcttctaattctctttatttccttctttcattgcttccttctttcctgctaaccctagtgggtcatttgacagctttcagggatcgggagaactcaaagcctaagagtgtttggtttcctaggcactcccacacccctcaaaaaaagaaaaaatgcaagtcagcattaaaacgaactaaatatgtttattttttatttttcaatatttggagacactctggggtggagcaaaattgacagtctaatttaaaaagacaggttttttttgttcttttcatagaatgattgttgctaggaaatggacatatgtttccagacatattgatttgaggatccgttagccagataaatgcaacgcacatccaaaaactggttagatgttgattttaaacattggataggggatgatttatatagcatgatctgtataattgttgtgacttgttaaaaaatcttcatgttgtgtgagttgttaggataagagaggataacaggggaagagaaaccattagtagacatatgttcacttgttgggtgtgcactgagttctgcctaatatgagataggtcaggatacccagagataaactccctggctctagggagtttacatgtgagacctatgtttataggaaaataacaccaagttaattagaagggcagccagtatatgcagaggttaagagctaaggactctggaatcagatcaacttttgaattctagttctatcatttgcgagcttcatgatcttggggaaacttcttatctctgagcattgctttcttctgtaaaatgtggataaagttgccataataaagaaaatattctttgtgtgtctgaatactgcaattttggccccggaataaatgctcaccaggtggttagctatgctgtgttgtttcctgtgggtctttagaggctgggctggaggaggtttccagcaagccaacactttgatgacggctatatgacacagtttcataaacctgaaattacagttgtgagtagaccattttaatttgttttttatttctttttgatattagtgagcctttgtatctgcattaagagctgccacttcctaaggccatataaatcagaataattgatcaatcaggaataattcttaatttacatcttagtgtgaacaacatggtaattcattgcatatgtgctgacataagtgttccaaaaataaagtcaaacaattgtgtgttcaatatcagctatttttaaagtgccaaaaacattaagatttctgtttttataatgactcatgagtaatattgggattttcttaaaattaggaacagttcatctttctttagcaaaaatgtcccttaaaattgaaatagtttagtttctttttagggtaactttttatgtcttgatatgaatgtaatacaccattgtagaaaaattgaaaaatacaataagacataaagatgaatatagaaacccttactgatactaagtattatcttgacaaaatatcagtttgatcattcaggaatgcatataatggcttctgtgttagaatctgatggggcatgggaattgcataaggatcactaatattttcattacttgttctaaactctagtttaaatgaagagggagaacttcacgtaaaatagaatcgattaagtatgattgtgttgcagcattattattggatttctgatgctttgtgtcattctttgaaatatctgaaaaagtcaatgtgcttgtaagaaacatgagtgagataatattaacatatgagggggacttggaatagaattgctggtgatacaggaatttgtagaagcaagagaatcaagcaagagaaaatatttcatcatttttattgaaagcttgaaactttttaatactctcaacagaacaacatcttaattttacaaggtaaatttgaaaactagaaaaaagaactactttctttttagatgatggtaccaaagttgttgacgtttattatttctccattcaaatgcccaagttagcatcttagtacctagagaactaattccctctggtatgtgaaccagtagagagagacctaaccagaggaagggcactaagtgccaagttagacggaattgttttctcagagaattgttacctaaaccttggtatttgcattttaatgaagttccagaaaacagtttaacttttattagctacagtcttttaatctgcgttttttcttttttcattctctttcttttttttttttttttttgagacagagtcttgctttgtcacccaggctggagtgcagtggtgcgatctcagctcaccataacctctgcttccccggttcaagcgattcttgtgcctcagccccccaagtagctgggattacaggtgcccgtcaccacactcaactaatttttgtatttttggtagagatggggtgtcgccatgttttccaggagggtcttgaacttttgacctcaagtgatccacctgccttggcctcccaaagtgttgggattacatgcgtgagccgctgagcccagctaatctgcgttttgacaaataatatttttcagattgcttagcattaaagagcttgtaaaatatatatgaatatatatgactctatatgaatatatatataaatctgaacatttatgcctgaacacaagcactttgttggcttcacgttagtaactcatgagattttgccttcattttgtgtaagtcacttgaagacccaagacaaattggatgaagttttaagctgttttgtatatagtctgtgtttaataatcttcatttatactttgtaagaaatgaaaggagaatcctttgggcagatggtattatgtaaagtggtgacaaggaaatctttattttgatgcagggacttaattacttgtgaagcctatttataggtaagtttaggttgatttgcttgatagacttagtaaatcttacaagtgaaattcagagattctcatctattaaacttaccagatttaacagaacatacagggagttacactgattcagagggaaaaggacaaggaaggaaattgctatttctatttaaataacatttttcttttctcctttagtttgtttgaaagttaagcccataacaagtgttcgttgctttttgtcatgatcagaatattaaaggattcagtaataagagccatttgtggccttttgtaataatccatcccagttctaggtgatcttttaaaacttaaaatagtagagatagatgagagaaattcaatgttcttcctttcattctgagtcagcttcttccagtcttgattaagcacgttgcttgtgacaaatacaaaccaaaagtgtcccagctacttgggaggctgaggcagaatggcgtgaacccaggaggcggagcttgcagtgagcagaggttgcaccactgcactccagcctgggggacagaacgagactctgtctcaaaaaaaaaaaaaaaatcatatcttctgggaggatggccattaaactgttttatgaatattcaagagaggaagtcagtccttctgatatatcacagggcagtggaaagagtcccccttcatcggagaaaaatcagagtgagggatagtcagtgaagcctgtttagcattttgcatcgatcatcaaacctaaacaagtgtttctcagacttgagtcagtcatacaccacctgctcagtctttgctatatatgtgccacctgttttgctaaatgctcaacattattcttaaagcaacattcttttaactttattttaaaaagaaactgtgtgtcatgactgtaaatggaaagtcattgtcatgtgttgtaaatagaagataagagtaaaaataaacactgaacatgtagaggtagtcaatttaagctagacagctgaaaactctggtctttgagccttgctttctctttgtctaagagcaaaactaattagtgggagtagaagtcaggacagtggtgggaaacaggactgaggagggcttttgagggtgctggtcccattctgctcccgatctgggcagtagttcaggagcatgttcacctgtgtaaatacaccaagatgtacacttaggatgagttcactttctttatgttacatttggataaactttatttttaaaagtggtgttacctgtttacaatagtaaagatgtggaaccaacccaaatgcccatcaacgatagcctggacaaagaaaatgtggtacataaacaccatggaatactatgcagccataaaaaggaatgagatcatgtcctttgcagggacgtggatgaagctggaagccatcatcctcagcaaactaacacaggaacagaaaaccaaatactgcacgttctcactcatgagtaggagttgaatattgagaacacatggacacagagaggaacagcacacaccagggcctgttgaggggtggagggtgaggggagggaacttagaggacaggtcaacaggtgccgcaaaccaccatggcacacatatacctattaaacaacctgcatgttctgcacatgtatccctgtttggtttcgtttttagaagaaataaatttttttaaaaaacaagtagtgttaacaaacatttttgcctcaaattgactctgtgctctagatgtaagcagatgggttagagattgacaatggagtgacttggataacttgggttagagattgacagtggaatgacatcatgtcattcaaggtcgttttaatggcagagcccagggtcacctaaaataaagtgaagtgctccctgacttcagcatgcccagggctgtcgtgtaccagtctgagctaaacttttcatgtgcctgctttggtttggttggttgaggaaagaaagagtccttggagattagaatccactatagagaggaagaattctttcactgctaaaacttcagaggcaggaagataaatattaatgttactgaccagaaattggggaatccctctttgataaacaaacttttgtttgtttttatacaattctgaaaaactatactatctttatacatttgtagctatttactgtatgtacatttgtccgtcgtgcggcctaagcatagatgtaagtatgactcaaacagcaactcattctacactgttctttgaaagagtattctgcaaacttttttggtactgacctacagtaagaaatacattttatatgtgacccagtgcagcactcacaaatgtaagtgagcctgggatgtatgtataaaaatggaaaaaaagtttcatgcgagatatttacccttactgcatacggtgtagtctggtattggtattttactctttttcttctaatgccatttgccactcactacattgatttcatggctcactaaagggcagtggcccacagtttgaaaacattctgctttggaggatagggctgtgccttcgtgttaacagcagatgtctttctgatattgtaccctggggtctgttggatctgctcatggcaaaactaaatcaaacctgttgcaaaaacaatggagtcaaatttgatattagactatatttgtaaaaataatctcctcttcctgtcacctttccacttatgaacttcttatttgaggcaaagttcatgggccctgcactccatcagcagttggatggcattaactggtggtcgtttgcatcatcatagacttaccacaaagggacatagctccagcctttggaggcataactcatttctaagtgtgtagctttggtgtgcagggtaatttcatctccagttgaggagatttgtatcagcttgatgtttgatggggatgctttgtgtggcatgtgtggtgattgcctgcactctggattctggtaggaaggtagtaagttacacctaaataggtctctgaatccagcatctctgagacccccccggtgaagtgtccctgtgaggtttgcagtttgttaggaaaagatcaaggaaggccctgcttgagtgtaagctcttgagagcagggacacattgattgtgctctgcacaccgcatattctcagtactagcaccatgcctggtacagagtattcaatcagtaaatgtgtgttgcctgactccgaaatagatgtacaagtcacacaatcaacttctgagggtaaaactgcaggcagtctaacattagaagtattcagggcaggtgacagtatgtcatgaggccttggggacatttgatacttcgacaacacctcctgcagacaggtggaatctgccagctgtccatacaggaatagcagcgggttaaaatagatatctctcccagtgccaggaggaatttaggagtaaagagttcctttctttagaagcaggggaatgaatggggttgccagagggaaatcgtgaggaatccctgattttgctctttttaaaaaatataaatataagggtatcataagaaaattaggagtttaatttttggtatgccacattgggttttgtaaaatctaaactttaaaaatctgcatttatgaattccagtatttgtatttcaagtaaacctttttcttagtcctgtttaacaataagacttaggaaattgtgttatttctggttaactggttccatgcaagacagtgtaagtttcctttagcagttgtgctttttgcttatgaaggtgccagctttgccaccatttttggaaaatatttaacattggtcacctttgtcctgtcttccttcaatgacttggatcttatctgcctgtcaaaacccgttttggcaacataaaatcagtagcaactaagttctggaagatgcctttgctgacacctattttgagtgtgccatttcttcgatggaagtttagtcactgttgttgtcacagaatttccatccatcttccaggaaataattgctttgccacagctgcttaattaaactgaattctcagtgaagcaataaaacacagtggaactttctgagggtttctgggggtgtgggggtgcggcaaaggggtggatgcaaatgagggcattaagcaaaggccttgagaaaggtcttcatggcttcctaccaccaggccacaaccttgctttgatgaacaagatgatgtttaaagcctattgtagtaaacagatttattttacctttttattgttagctatctgccaaaatgttcatttgtgttctgtgctgaactagtgagaaaatgtgacaagctgaaaatagaggaatattctcatagaatgacagttatgctgaacccaatgtaaatcttaatataaacgaagagaccaaatagaaacttcctaatagacatttctgatctgtttttctaatatcatttgctaagaaactttaaaacttgaattcctaaactttaaaatggtaaaactaagggcagctatcttagtttttgctttaaacactcagccaagaaaggaaactaaaattgtttagagttagtggggcatctgcttatgtgtttatatgccagccaatttaaagctgaaatgttatctcttcaaagtggaggcagcctggactcacattaaaatagtttattttgaaaaaaaatttttttaaagatttctaaaggagtaaaggagaagataaaaccagtgcagtttctttgtccttttggagtgttagatggcagaagtcattcaaatggatgtttttagtgggtgatatcccaattacaaaagttaaaaagatagtgataagctctctgcatacttagctgcttatgtcaaaatatattggtaattttgagtgcatttaatgtagcattttgcttagcttggtattctaacaagaatgaacatattaactatagaatgcaacgtagcttttgtatttagagagactgccatggaatgctgttaaggacataccatagtaatactagaatctaaatcagaacactagaggaatcaaaataactgttacaagtgactttaaaacaaacaaaaaactaggtagttttattaaatttaattaatattttctctgttttctaaatcagcttttattttcttatccacaacgcatatgcatacacacacacacacacacacacacacacacacacacacacacacacaccattaaatgaagcaccacttaacttgtgctggaaatgtagccacttagttggacaaaacttgtttttagcactcaagttcaactccaaagtgaaagggtctgtctgtcattatcctgtttcctggatggaagtggttattcttctctattgatcatttttttcctttccttcctaacttaacccctgtgccacctaaagttcagtagtaatcttgaaagatgctcctgtaacaaggatgccagattctgctcattaagagcattgaagtaaaagtcgcaagttataaatggcctgctttttttttcctcttttttttttttctcccctcatttaccacactagacagagggaatgtcctggccttgtcagagagagaagagaactgccctggcattggaagggaaagcacaaagctaattgttggtggcttcatgttacagaccacctaggagacaaagttagaacttgacatcatttagaccttatttaaggaaactaaaatgccattttcatttaatttagggaatactgaaagtggtggtagacaccttgctgaatgtctctggagattggaaataagccatttttgcttgatgttagggttgcctagtaggtttaataagctggtcatggcattcctgtgagcagagtctaaggtgggatcagtccttccatcatacgtttgtgagctatttgctatcataagttggccactttgagggtggactcctacagtgacagattgtgtgaggtactgtggttttaggtgagtacagaccagaggccatcctgtgctattttacttgcagagttttctcccttcctgttgttaaattttgttttgggtcctgaaggtgcttatggctgccatgtttccttggcagagtgtgaccagatggacacatagggagaatgggaggagggtgcagaatatcacagtgggctagtgttgggtatctagtggagttcatgcatatgttcccaggtgaaaaggtctggaaaccagtgctgagaatatcaactgctagcctgaggctattttcgccatatagttaatctgttactacatgatccacagaagtgcttatgtaggaagaatttacttccataaaattctacctcagtcgtagcattgagcagcagtatgtatagtggataagggtaagctagctgtgtgggtttgaatcccagctctgatatttttgctacgtagccttgggctagttccttaaattttctggaccttcatgttcttgcctgaaaaatgagcacgacagtttctatctcataaggtaggtgtgctgatttaaatgaattaataaatcttaagatgttaggggctgttagaagagttcttagtacgtagcaagtcctcagtgacattatcacattatgattattgatagtttccattgttgagtggctcctgtatgcagttgagtacatacacaatgagctcaggcagtgagttggtccaaaaaatgcaaaaaatgtaaggctatatcaatagaagtatcactgaataagctggggtcacatccatgtgatgaaatagtatgcatttattaaaacccgtgagttatatctgtgtctattggaggaatgggctgtttcctaatgtgctatttcatttcattgtccccacaacactgcaataatacatagtatcattctcattttacaagtgacaccactgagacgcggggtaagtgccttctcagaggtcacacagctgaccattgtggatgacaggatccaaatccatatctggctctgtgtgctttcctttatgccacatttctgtccagccagatcccatgccagtggatagttggagcctcattaagttgttggagcctcttcgagtgaacaagtatatacaaaactgtgtgtgtgtataaacaataatcatcataaaaacatttagccaactgtatatatatatataaaatatacattttgttttaaaatttatttttgttagtataggtataggaagtattgagaatttgtacacagcaagttgccagcagtggcctatcttggtgagtggagtggtttctgagatttttgtactataatgtatagttcattttctttaaaagaaatattttattcaatgcaccatcccccagattaaaatgttttgtggagttgccacaatcattgaaacaagacattttaaaataaaaaaagacaaatctacatgtgccttcctctccttttcttcttcccataccctgaggtaagcagtttgcagcccagcacaaagccttccgtagccttcttcatgattatacaaaatagaaacacatgtacacatatgagatgtcggtttttcttttcttttttgagacagggtctcattctgtcacccaggctggagtgcagtggtgtgatctcggttcagtgcagcctcaacctcctgggctcaagtgatcctctcacatcagcctcctgggtagctggtaccacaggcacgtgccaccacacacagctaatttcttgtatgttttgtagagatggggtttcaccatgttacccaggctgttcttgaactcctgagctcaagctatcttcttgccctggactcccaaagtgctgggattacagatgtgagccaccatgttcagctttttttttttttaatcattgtctttacacagaagcaaccctcctgtgctcattttccaacatgttttctgtaatagcatattgtgcccattccatcaatagatacaaatataacttactggttttaataaatgcatgatgttgcatcatatgagtgtgagtccactttattcagtgacagttccattgacagagccataaatagttctgcatttttttggacctacaagcagtactgtaataatgtccctctacccatttcctatagtcctgggactcggactccaagaagttgaatgtataacatacactcatacagtttttaaaattgtattttccacaataagcagatatttctttataatcagaaatcttaaataaaatagaaatgaaatcttaaaatataaataactaaatcatgcgttcacacccacacacagacatacccacacaaattccaaggctggttattgaaagatgtgtcttccaaaagtagagtcatgtttattcaaagacaaacataacatagttgagtgtgtatgttcacagcatggggagtgtttagtgtgttttaaaatatgaggaaaaataaaaaacatcataagcaaaccatcagttctctttgagagaaagctgctctcacacacaggtgattctttccatgaaaactccaaaaggaatgttgcttatgcttttgcataggtctgttcttcttatgtaggagtacatctgaactttagaaatttacatttgagtaaacctcaaactccaaaatgtatccctcctccccaaaaagggacattttactgaaataaaatctgttgctggttgcttctggtatgttatgtcaaagttgttaaccggatacagcaaaggcagctgcattgtatttcagaattagtttgaggtagattttattgttataaagcaagacgcaattgaagccacactctgggaaaatagcagtaacacaaaacatagtaatttaggcagaattactcagccacagatgtccagagaggtataggaaaaggtccatatgcactttttgtaggcaaacaagtcaaggttaaataaaagccctattttgagtcttaggctggatgtcaagaaattgcctcacaggtgaaacaggtccagccacagaagaggctctgttgttacttgagtcactaaaccatttggatggaggccagtgcagccttctcctctttatgtcaagttcccatctgtaggaaatagtgcctatagtgcctggtgacatcacaggatcactttgagtcagtggtgagtaaggcataatgcaaagagtaatgggaaacactctacacttgagagaattcagaagagcagggaagatgctggcgtgtttgcctctctggctaagccagcatggctgtgagagctggctgcacaacagacaagaggcctgcgttatctctcagctcagattctttgtggtttgggaaagacagaaccccataaggatctgaggaaagttatggatcttcatgccaaaaaatttacattctcagaggctctcatcctctctccctctcacttgtatacatacaatttcatgggacttgtggactccttgggaccattcgtgaacctctgttaagaattcttaagttctttgcagggtcctagacaaagctctgaaaattgatatttttcctcagtgaagatcaactcaatcctaaaatggattttcagtttttcagctgaataaatcaacacccataggagcactttacagaatatggagacttgggagtctgaggtaccaaataacatggaaatgataggtggagacttcttggggatgtgaaaggccttcctttcatgggttaagttcatcgggaatcattgctgcttcggtgagatttgaacttacacatttttctgtataggtctgaaggagcttagtctaaatattatgtaaatatgaccccatataaatatatatacacacacacacacacagagacactccatacataatgggatagatcccatggagcaaacctcaacagtggtgccgtgatttacaaaataacctctcagttgcacccttattacagtcagatcctcagtggcgggcttcttacttctctcagagtgaaattcactcttacacaggggcaacttgcagtgtgccacattcagaaaagctctttaaagtgtagtccctgtcatttacaaatgtgggctaattctcaatacctgtcgacctctatgttctcatccaaaatatggaaatcatagtagtacttttaaaataagtttgttggaatctgtaaataataaaacagtgtaaagtatttgtaagggccttggcatatctaacacgctaaataactggtaactcaaattgattactctttatgattatctagcagtagctgtttattggctttagaccccacagagtaggactaccttttatctatgtaggttgttataataaaatgccttaaactgggtaatttatacacaacagaaattcactgttcatagttctggaggctgggaagttcaaggtcaaggtgctgacatattcattgtttagtaaaggctgtctgcatcaaagatggtaccttcttgctttctcctcacatggtgaaaggggcaagggagctcccttgagcctcttttgaaagggcgctaatcctagtcccaagggtagaaccctcaagacttaaccacctccccaagaccccacctcttagtactatcacgttgggtattagagtccaacatatgaatttgatggggacaccaacattcagaccaaagcaaggaccttccaaaatcagtgcaccttggaaaatttttgtcttcagatattactgaggtaattttaaaagtctagggagtagggaccggctaagaggaactgtgtttaaccatgtaatactcttttagcaaaccaagtgcctgcgtaatttttcacacagttcaagaatggagaaataattctgtcctaaactctttccacttcattagctgaaatgttcacatttctcatatccaagcagaaaggggggcaggttcctcattggtccctaaagcaaacttggattaatggctcctattaatttatctttgaaataagaaagaaatcctgtggatccccagtgtattgacagatttttaacactttacccataaaatcaatcaatctctctctttctaccccttcttgccaggcttttactttttgtcactcattctccctttccttttcatcaaaacattttgtcctaaaggaatctttaatttccttttcccctatgtaacgggaacagttacagtaactaaaggtaccttgaaagaatggtcggctgggcgcggtggctcacacctgtaatcccagcactttgggaggccaaggctggcggatcacgaggtcaggagatcgagaccatcctggctaacacagtgaaaccccgtctctaataaaaaaatacaaaaaattagccaggcatggtggcaggcgcctgtagtcccagctactcggaggctgaggcaggagaatcgcgtggacctgggaggtggagcttgtagtgagctgagatcgtgccactgcactcgcactccagcctgggcaacagagcgagactccgtctcaaaaaaaaaaaaaaaaaaagaatggtcaaagaccatatcataaaggatcccagtagtaaacaaatggcacacttaagataggatccatcagagagtttagtaaaaggacgattttcaaggatatgagaagagtgtaggacagagatcggcaaacttctgtaaagggccggatggtaaatattttcagccttgcaggccatgtggcgtttgcttcaaccattcaactctgttgctctagagggaaagcaaccatggacagtacctaaacaaacaggtgtgtcttccagtaatatgattcacaaaaagaggctttgggctagatctggctccagggccatagtccattaaactctggggtacaggaagaagagcatagggcagtaactgggctagtagcaatgctgtgaccggcctttggcttgaagggcaggagtggaaggaggtaccagaacctagaagaaaggcagtctgtgaagagggctgtcaagacaggagctgtgcactctggagagagtgctatcaagagacatcccacaggaaggaactttggggcggggcacaaatctagggcgcatttctcctctctcccttggttttcctctgctgtgccccattgactggtcccagctagaagccagggagcgagggagaccagagaaccattctatacaaggtatcctccctggggacagagagcagggtggaaaaagggaagctctctggcaggaggaggaaatgagatatggcacacaatgcacttagcatggattccccaggtaccaaggactcttgttatttattaatccttgtcatcacaaacatctgcgtctctgattacgtgtggggttgcaatgtaaaacataagtgagtaaagggagcatgagtagaactttccacagagatccagtcacagcagaagctagtcatgtaagggtttctcatcccttgggtttatcaagctttcctttagattcatcgttctgaaaagttgcttttggaaagacattacaccaagctctcaatttgggtttgaaagctgggaaaaaccctctttgctagaatgaatgaatgaaaattgacctcttatagaatgattcatcaaccatgcatgagtgagcgactccatttagaaaagtattaatttagtcatgtcccaaaacatcacatcacattgcagattaaggtcagcaaaaatgaatgttttgacaaccctgtaatcagtgctaatagaagcattgaaaataagtgtcttgagaatgtgggttgtgcttgatttaatgtgttattttttttttacttattctaatttagtctcattgtttctccagaaatttcacttatctctaagactttgacttctttgtctataactctaaatgtatagtaacacacaccaacaagatgacagttctgtaaagtcccacttttttagcacacagggtagatattcatgtctatcaacaagtgtatttaggcagtgaattcaatcatgcaaaattgaaaaaggcaaaagttggatgatttcaccaggctctttaagaaacttgtgtttggtggtgatgcttgtcttgaaaagataaatttcctagtacttagggggacttagaattctacttgcatcaccctgaaaacttgtttctctaccttttatatagctgggatcactgattttttttatacagaaagaaaaagtacatgtaaagtccctgctaaagtcaggctatggcattcttctttggcacactggaacctagaaacactagcagttgtcttgactcgtagattgattatgggacacataggtcttgaggatgcagtttcactcggcctatatcacgtatatagatatcagctttatatcagctttagttttgaatggctttgggtaacacctctaatcatatatctaaactgtgttattttaatccatctcaatttagaccttattctcccatccttaacactggatagagctcatttcctcagtttggggtagtggagggtaaaggaaagaagttggcagaaaataggcagctccgtatgccactgtgcatatgtgtgtgtgtgagagagagtatgcatgcatgtgtgtaatttcttccaaaggacatataatgactccctgcagaatgatagcaatataacagaagatgacttcgcttgatttttctctctttttctcctgtcctcctttcctcatccccctgcccctctctgtctctctttctatgatatttctcctgaacttccaaattgtgtgactctaagttttggcagtcaaatatacatttgttaagaggcttactgcttaggtaatatgcaaaaattggttagatcaccataaagaatcataggaaaaatttaaaaactcagggatcagttaatttggtctcctgtttgtctaatgagaaaacagaggcatacagagctgaagaacctgttcccattccgtcatctgatggctgcagagttgggactagagccagtcttcatttgtcgtctctacaacacaatgcaggttctttctataatgcccttctctttcttcttctgaactttcttggataaagttcacatttgtctataagcattttttaagcacacctcacatttttgtcccaactgtaaagtaaacattatgaaatttggtagttaactttctattcaatttgactgctgtttctcgcgtttctacttgagaaggtcactgtgtttgatcaaattctgggagaaaaagatgagatgaggcttcttggagcaacttcttcttgtgtggtgcttcactgagcttgtggcacatgttagtttggaaaggagatttgccttgaaaatggggtctctgaaccttctgggagggataaggtagtacagtggagttggtcatgcaaggatggctcttccaggttccaggcaccgacgtgaactgcaaaaaacacacatactgtatttgctctatagttatttgtgaacttctcaagaagtacctgtgtaattataaacccctgttcttccttgtcagtacagtataatgctgcttacgttcattacttctttaggcgatcatgttgaattacagaaatactaatttttgtgataaacatgaagtcctttagagcttggggattttctgctgtattaacttactaacttttttatttttaaaaaacaaaacatcactttgctctcttgtacaacacttcaaaggaatgacaccttatcaagccctttggtgagctgagagatataaaactcggttatatttgacagcatgctccaataggactgtgctgtaaatgaagggattgtttagcacagggctgaactgccagagacggaaaggggctagatgaggggggaagttgaatttgttgtaaaaagcaccttcttatcttttagatttagtcgatactggtttctgccctttggctaagtttgctgtattaaaagtgcttgttccccctttgggaggccaaggcgggtgaatcacttgaagtcaggagtttgagaccggcctgaccaatatggagaaaccccatctctactaaaagtacaaaaattagccgggcgtggtggtaggctcctgtaatcccagctacttgggaggctgaggcaagagaattgcttgaacacgggaggtggaggttgcagtgagctgaggttgcaccagtgccctccaacctggacaacagagtgagactccatttccgccctccccaccccccccaccccagccaaaaaaaagtgcttcttcctgtgaactcattgactttatttctgtttttaaagaagtgttgtgaggggagtggctaagaaggatttctcagctataccagctcactctgcctaattaccatggtcaagtactcagtttggttttatcctagggcaagttctcttgatggtgagaagattagcagtcaagaggctccaagagaggggttagagtgtacttagaggacagcctttggctttagaagataattgatgtttgacattttttccctttgtaggctgagtgtcaaatatcggacagggcgagagccccctcattaatcctgacaactgttacttctctgtgatgttagaataaagggtatttgcccttttaatgtcaggccttcttgcctcctgcaaaccactcatgtccagaggatgtactaagaagctagctgcatgcttttccaggcagctagaagtttgcatatatggcaaggcaaacttggccagcttatcttgaatgggatagaaacacccttctatatttgctgtgaattttttttaaagtggtacaatatgggttaatgtttagagctgactatggtaaggaccgtatatgtatatgtatatgtatatgtatatgtatatgtataggtgtatgtgtatgtatatgtatatgtatatgtatatgtgtgtatgtatttgtgtgtgtggctatttttaaagcctgctaaagtatttttggtggacttgcatagattgggaaaaatgaaaaccatctctgacgctcaccttttacaactgaggtattaccatagaacgggcgttggcaaacttttcctgtaaagagccagatggtaaatgttttcagctttgggggtcatgcagtctttgttgcagctactcaactctgccattgtagtgtgaaagcagttacaggcaatatgtgactggatgagcatggctttgttccaataaaactttatttaataaaacaggtggtgggacaaatatgacctggtgagtgacgtgtgttaacctctgctagaaagttctactgcttaaatatagctctggctttgtggctagatttcatcttagaggacactttgcccctcactttgcctcctcgtcttcccagatgccacattgcagattgtcacttgctacagtctgtaacaagaacatatgattctgggtgctttatatatactctgtctttccctggcaactgaaggccctggagatcttgcctagctgttgatctgctctggggtcctaccttaatatgttctggggtcttgtcttgccagagagggtcactgtaggacctcagagaggcccttgggacaggtaagacagatcagcatttcaacagatgacccctggtttccagtcaactatcaacaaccaacctctgtatcttattagaggctctgagataagccttaattccggcacactgtgggacacaaaagagcctaaaacctcccttttgctaatgagttgtgtgttattttctcactttatctcagttctccagcctaactgctcccggagccatcttttcaaaattccaacaattttttccaagtttcccattaaatcattgaaatccaaatgatacatatgcatagttttcccaaatgcaggagggaatctgcatttttttattgaaaaagggagggggcactcttgcaaaataaagctactccctctgcctcatccctcttggcttgatgtaattatttctctgagtatctgatttgttgctgtctctggacagtgctgctccttttttgtactgctgtcccactgcttgcagtgactcaggtgtgcttggaacaaggacgcaaccaactgtggttgaattatatgcaccctgacagccggaatgtacagtgtgatttatgggagttgttcacacagagatccccagatagcctggttttctgacatacatgtgaagttttaaggcccagggtagaggaatacactccaaggaaccaatggatgctaatgacatttctaagcactgtgatgaatcgatccaggacttttttatgtcaacttagagtatactggaatagaacacagcattggatttccataaaactgagctagcagctagaagtttaaccacatgaactttgttactttggaagagcttattaaaatctctgaaagagggagaagagataaaggaagaaaaccaatccttgtgaccacacattaaatgggtcaaaacttagcaaattcacagcccgggcaaatggatttaatggtttatttttatcaatattttacaatagaatttgaaacaagaatgactttggacacctgaattccacctattcactccagcttgcttttctttaaaagaaaggtaccaaatgaaatgatttttaagacctttttttgcactgaatcaacattttgttgtcacaaacctgattagatttctaaaaagtatcatactgtcccttgctcaagttaagtacaaaattgcctaggaaattttttctaaacccaatgccatgttccattctttaccctgccgtttcccagcccgaggattggagtgagtggaaagtatgttcctgttttttcaaaacggtgctcgggacacatttgtgaccacaccagcttccatctcactgccacttctgctcttccggttctgagcagccgtcttagaggtcaactcttggagcagtctgttgatgaggtgagagccgcctgctcaggggagataaaggtagaggtctccaggctcttctctgggggcaggactctcaccccggcagctgcggctttgattgaaaaggtatgtggccctctggagctgacttcaaccaaatggcattggtctttgaaaaatgtactttagcacagcccctgtggaacgtgtttacttaaggattttacccttgctttagaagtgagaatgtgactacagctggactgcccctcactgaaggcatttgctgcgaatgtgtcttctgctaatatgtttaaggatctataatgaaaacagagtcattctgaaataaaaggacattgacataaaaagcagtaatggttgacgctatctgtttttgaagataagggttttgtcacaaaggcacgatttatggtgggaatactgaatagcgggagtgtggcaggtgataaatcactgttctcaccactggatatggagaaaaaagggatacaaagaccttttaaaaataggaaaaataaaagcactccagggcatgtaattttatggaaaacatggtagagaaagtacaataggactgagattgtatgttgttgactgaaatgttttaatctcatttggaggaaaaccatagttaaggtagatttttgtaaaactgaatcgtcaaaaacttagtccatacactgagcagcatataatcatgctttttaatgtagggcttccatggtagctatgatggtgataaaaatcacaatctttctcttctctttatcttgtgcacaagttttcttctgcccacagccaggtagatgagagcaagcaaaagcagatgtatttataggatgttaagggcaagaataaaactaataccttaagagactttttaggaacctcttggaaggcatgagtccagggaggggttacagagtctggggacctcctgggcaccttcatcctccttctcctcctcctcttttctctgtgctgctggaaacctgatacattgccacatggatgggggctcatacgggccaccattgatgcttccttgtagatgggaaggctctgctcccggatcagtcaaaatcaagggctagcttttgaggaaacctgaatctaggcagccggtcatttggagcaatagattatcttagagaggattccttctcttttagaggactctatgaatgcataatcccatcagtaagtgagcatgtgggttaatgccgcatttattacatatctggggatatgtcaggtgcaggtgtgaggattcctgtgccacatagcagaacaccaaaaatcaattcaagaagtgtattcatacgcagcctttactttttggccagtacaaaagcaagtgaaatatgccggtaattgttgccataaaatagcagttcatagtctcacattttgttaacattcgttgtctcttctagatgtatgcctcataagttagtcagtattcgtttgttttgtcattcatttatttgttttttcattcattcattcattcatttgagaaatatttgagaccttctacatgcccattgttgtccttggtgccaatacacagcagagaagaatacaagagtcctgccttcatgctgcttaatcctagtaggacagagccaggcagtaagcgagaccaaatatataatgtgtcagcggggtagtataagggcttggaagaaaaatgaagcagggtaagagaacagaaagtaatagaaggctaaaggctgaaatggcatcattttctcaccccctctcaggagtcagtgtcacccaactcctgtctgcctcctgccttttatcctaaaaacagccctgtgagggggcaagcaggactgtcatttccatttacagatgatgaaaccaaggcacagtgtttaagagatggccaagatggcacagcaggtagatatcaggtcactcagagcccctgttctcaacccctcgagagttccttctcttcaccactgccagccctagtccagcccagcgcctggacctttggccaggggtaggctcagtgagtgcatgtttgaaccaaggcactgtgctaagcactagggaggaagagaaaggtaacctcaggtcctgcctggagaagaccccagacacagggctgaggtttggcacagggctgtctgtcctctgtgtctgtcaatgtgtgtgcgggtgtgggggtgggaggcttctgagaaagcttcactgaggagcagctgatctcattgcagagaagaggagaaaggcattctgtgcagtggaaattgtcagtgtagacgcctcggggcttaagagaacgtgacatggaagagacaggaaatatgtactcttgtacaggtatgcggcacacatgtggccccctccctcccagcctcctcactaaagattattaacctgcttattctcctggttcacctgaggctgttttgagagaatctcagtatctcagtcttcatttcatacgacattcttcgggctcctcttgttcatctttgcagactgaagtatttatgaaggaccttcagaaatctgattcctcctgatgaatcaaagagtaaagaagaatcaaacatgattaaccaggtgaggcaatgtgatgaaaaggggtgtgtgatttagaataggtgagctgggttcaaagttcagctgcagcacatactttgggccagttattttacttcataggacctcagttttttcatctagaaatgggaataatgatacctacctcctgagagataaagggcagaacaacaatttcagcaaggctctatcatttcagttatccttccctgctacagtgcaaatctctcttaaagactgtaggtctggcttccgtgaatcaaatagaaacagttacagcataagcctgggccactgtgttgccttgggatatgcatatcacctgttttaatcccaggatttgactttcctcctagtgctgtggctgattatttaatttttagataatcatgtagcaaatatcatgtattagaaggtagggctataaaaagagtatgccacaaacagagtttggttgttggccagcaagtcccaagctgcctctgctgccatgtgctaccatatcaagcgagttgcccgggaatcccctgctgacatcggtctgtctcacatgcgtgatatttggaaggtagttttggtgtgtatttgtgttgatcattatagtaatgacatgcatttaccacagttttgtaggagagcgactctcagctgtggtttagagacatagccctttggatctccaggtatctcaaaggctgtaaaacttctcaagtcaaaactagttttaattttactgcttgagagatgcagtatgaaacatatgacagcaatgagtgtctatttctgtagcaactcaagccacctgcttttttaggggaagatttataataaaggcacataactatagggcttttaaccttgatttaaaaagaaaaaaaaagactttcctgttcattatcatatctagctctggggagatagacaggttagtgatgatctgcaccattttacagatgagatccctgaggtggcttgtggctttggtccaagaagccatttatttttgattgctggcttcacatggctcctcccttggctggctccttcttatccctaatcccctatctttgttgcttgtctgttacctatcaaaagaagccatgcctgatttctctattggaggttaaactgcttttcccacctctggtttcccttcaactccttatttatttcattatcgcattagccactagttttatttcttgggttttcaaatggtaattattatttaattttattgattagtctgtctccagcattagaacaaaaacacataaactccatgaaggcaaggaccctatcgttgtatttctgttgccctagggaggtgcctgacataccagacaccctttgttaacatgtttggaagggagatagaggctaagttttaaagactaagctgatcattgagttcctatgttccaacagtaggaaacggactggaggaaggctgtttgaggtatgaggattattataaaaggacatttttacaaatgaaccaggtttagacttcaatatgtgtagagttctctgaatcatgtctggcagataaataagacttgcttttgggggagttttttctaattcagtgggctttgaattagaaggaattccaatgcttgttcttgttctgcttgagtagaattgataaaatctgttaatcatcagttttgctttaaacccttgaggaatttttaaactttggaaactcaggtcatgattttgaacttttatttctaataatgtacctggcatttttttaaaaacagattttgttactatttttttagatcattctcatattcacatatagtttgaaagtcttgttcctaaatctccatttgacagattgtagagtccaacatatgcaaataattaaggcattgtctgctcgatgtggaagtatccaggaaagttatgaaaagccccaggaaggatagatgtccatgttgatcaaactaccagattcttataacatgttgcttttacattgtgtcatatggctgaaccagaacaattctgttctggatgactttttgagggcatgtctaataacaactaggtttttctcttatatttttccactgggtcaactctattactttagatatttggggctacaagtaatagagatttcaaatccaaatagcttacacatattattttaggtacaaggacaggtgattcccaggttagtgagtagaggagctgagtggccttgtcaaggatccaagttgtttgtggtcatccttagcatgttggagtagtctcctcatggtcaaaatatggctgccacagattcaggcattgcatctcggcatgacagtctccagagacaccagcaagacaccgttttcttgtctttataggtgtgaagagagctttccaagaagctctagaacaggctgccccttgttagtggtttgttggacagaatgaaacaaaccactaatcctattatgggccataaattaccatgaatggcttggaccaattgggatttatgcactttctctgagggcaaataaaatatgggtcacaccatcaaaggaaaggcagcaaagagatgagtaggcaataagtagtcattgccataccagattcatcctactggaacccccctttatggatacattttcttactctcaaataatgagcattttcaaaatcaggacaaaggagtggttcttttgttgcagagttccttacataaattcatattttccttctaaattttctaagagaattttatggataaagactttccttcagtattttctcttatgagttgaatgttgtgctcacagttcatgtaaatattttgagaaaatgttataattccattttaatctaaagacttgtgagcctgcctgtttatcgctgaggttttctgcaatcctcgtactagaggaagtgtcattttgtgtaaaccaggaaaagaaattggttcaagtaagtctaattgcaaagttgctgaatgaagatatccctttctctctcttacaacaaaaatttaaaatataatttaaaattgtcaaacaatgatcatgtcacatctggaaatttcaggtttttactcccttgccttttttcctaattacctgaatgctctggatattcaggctttcagctgtttgacttttctggaggtaagaaaaggtatccagtttatttcacttttctcagatgtgactcatgtctttgacataaaaatccttatcgcacaggataagcctcaggaattggtttgaagaatgaagacaaacctggtttttatgagaatagggaattttttttttattggaagcatagttttctgtgtgtgtgtgtgtgtgtgtgtgtgtgtgtgtgtgtgtgtgtgtgttttgtatttttagtagagacagggtttcactatgttggccaggccggtctcgaactcctgacctcaggtgatccacccgcttcagtctcccaaagtgctgggattacaggcgtgagtcaccgcgcccggcccctgaagcatagttttcaatgaagagtcggcttggaaagcggtaggatttgtcccaacttcccagggcgtagtggaaggtgaaataagaccacagatttatcaacctaatccttagagacaacattcataaacatgaactgtcagttcatccaaccttctctccttttcagatgaggcctaaagagattaagtgacttgttcacttccattaatttttggtggatataggccgggtatggtggtgcacacctgtaatcccagcattttgggaggccaaggcgggcggatcacaaggtcaggagttcagtaccagcctggccaaaatagtgaaaccccgtctctaccaaaaatacaaaaaattagcaggacatagtagcaggcacctgtaatcccagctacttgggaggctgaggcaggagagttgcttgaacctaggaggcagaggttgcagtgagccgagattacaccactgcgctccagcctgggcaacagagtaagaatccatctcaaaaaaaaaaaaaaaaaaaaaaaaaaaaattggtggatatagtatttccctaaagccctggagaacgggtggtatatacagtattacatagtgctatgctgtctgatattgtgtgtacagttaccttaacactctgtacttgggtaactttgataatgcagatgtagaaattggcagtggtggtaatgatgatgagaatgatcatgaaaatcataagagagcagctacctgacatttattgagcacttactgtatgctgggcaacatgcttacacctattagctgtaacacaataattatattattgccccatttgacagatgaagaaagtgaatttagaggttaggcttgcccagtgtcacacagctggaagtggcagagttagcattctagctcacatttgcctaatttcagagcctgagttctaaattatgaggcttaccactaattattggggagggaaaggatagtatttatgatgctgagaaggaaagttcctgagtggtaccaggaatgacctggaagagtgaaaagccctaagagggattggaccatccagtgagcataggggattgtgtagatcaggtgaaaattggacctgcctcttcaacccacaagagaaagtgcagggcggagaagaaacctcaaggaacggagttgagctttgaaaggagaagttggctacaggtgctggagagggctgatggaatgtatttggggcagaggttgagatcctggccctcccatgtcacacaccctaaattgaggccacatggctgtcagtgaaaacaaacccaggtgctggtttcaataaaaggtgagactaggacacaaagaagggtagggagggcagagaacagctaaggtctgaacagctctgcaaagtaggtacatggctcccaggattatcagacacatttttcacatgggaagacagaattttcaagatgttaagtgactgttctaaatcattcagctgagactttcagtccccatatttgggatatttgatgtagagttatacaggtttggctacagaaggcatgactcaggcagagagaattagaggagccaggaagagggcagaataggcacagcctctaaaccagcaaccgtgctcacagcagcccagaagcccagggggagaacatgtgtgttcaaggtggttgcatgttcatggtaataattacactaatacccaataacagagaggttaccttgtggttatgagcctgggctctggagccagcctgcctcaagtcctacctctgcatcttctcgctatttatgttctgtcagattgttttccccctctgggccccagttgcctcttttgcaaaattagaatgataattatacctcataggatgttgtaagagtttattaagcatgtagagcaggagtcagaaaccttttctattaaggactcaatagtaaatgtttttggcatttatggccatatagcgtcagtcatgactacttaactctgccataagttggtagaaaattcaggcatttaaaaaatctgtttgccataggaaatttgcagaagcccacagcaggcaaatgtctcttgatttataaatgaaattgtataaaatagtagccatagaaagtagacttctgattccaaattatcagcaaagtcatgcagaaaacaggcaactttttaaaaaatataaggttttagtctgtgtaaaggtgattataagaggaatattccttctacgggtctgcttagctttctcctaaccactgcttttgatttatccagttcatcatcttttttttaaatagaaaatataatttggcggctgggcacagtggctcacacctgtagtcccagcactttggggggccgaggcgggcggatcacgaggtcaggagatcgagaccatcctggctaacacggtgaaaccccatctctactaaaaacacaaaacaacaacaacaaaaaaaaaatagccgggcgtggtggcgggcacctgtattcccagctactcgggaggctgaggcaggagaatggcgtgaacctgggaggcggagcttgcagtgagcagagatcgtgccacagcactccagcctgagcaactgaactagactctgtctcaaaaaaaaaaaaaaaaaaaaaaatatatatatatatatatatatatatatataatttgccaacttgcagcccatggttaaataagtaccaccagaaagtctgaaaatgtattttccattcatagaaaaaaggattaagctgacttagaaatgttttatgttgacagtatcacttaaaggagatatacttcattcttaatgtgagaagtgcatcttggaatcatttctggtaaagaattctcttgccctttccccaaattaaaaagaggaagaaaagcaaatgaagtacaaaagccttaaatttcagtgaatagacagctgtgctctctattcgggctttgatggtgggatgggggtgaatccattgtaccccaaattatgtaagcttcagaagcatttgcactacctgaagtcccggaaatgtagatggcatgcatttaacggggctgaccttggtaaatataggtttgtgattgggaggatggttttgtgacacaacttctccaaaagcaaagtgacgtcttagtaatgatatactttgtgtgtagtttacagggaatggagacttttttgttttattcttttaaagggaatctggaaaccacgtctaatttcaatctaatgaaacacctcctaatgccaggggtttctcaggtcagtttcctaagagaggcatatcatgcccatcttatactggatgtcctatgtacaaaacactatctatattacacttacctactagatttcttttattagcttttaccctggtgatgttaatggtattctcatgactctttttttatctgtgggacattaatgtgttaagggttatttagctcccactgtgtgcaatagagagaggtagggagagaatactgagatatcagttcatacatctctgtacatgtgagtgtaatggggatttaggcttttctattctgttttagaaactgtaaatcaaaccagatcaaaagatggtttttgaccagaatttatgaatttcctagtaagtgttgacacagcactgaaatttaaggagcagatgtatcttcttgaaattcaggaagctcacatgaattcctaatgaaaaacaaacagcttttccagcaaaaaaaaaaaaaaaatgacttgggtttctctgtgatgttaattgtaccaagttctgattatgtgtttcaaatcacagtaaaaatcgaggaaagaggattttttttttaagtttgcttgtccaggaattgagacgtgggatttcaggagttctggcccaaacacgtgcctcagaaaatggggtagacaagtgcacaagcatccgcatgtgaggatccgcatgcgaagatgcacgtgaagaccacagcttcctttctggtgctcaccatgtgagtgcatcatttttcaacagtagttcagttcagcctttcttatataatagccttgcaagtgaacggataagcaaagtcagttgctgagaaataacacttccgagctgacgcatccaaatgtttaggatacacctgagatgtctctcttactgaatagaaacaacatccctggaagctctagacttctgaggcaccccagctttccctggtgagtatattaaccttttcccttcttgacatgctgtggaatcagctggaatgctcatttcattgtagccactggacaaaaatgcagcttgccctggtcacagcagtaatgacagataaagtatgggagtttgtctaagagggggtgagccctaatggttgaaaggttgacagctttcagaatgtttgccacctctctttaaagcagctccaccagggcagtttggcaaatgtaaaaacaaaacagttatactgcttgcagctctaggattttaaatcacaaacaaattctatattttattcagccatccagtagatcaatgagaagtaaagcatcctaactgaaggtgagaaagtcatgtgtgtaaagtttattgtcgggatctctttatgtggttatgttctgctaataggcaaattcatttaatttttacatggtttccccagaagagctgtttacatagttgcttgttcttctcttcccttcccttgtcttccctgcttctctgaccattaccatctagacccagcaaatagactttagtgtacaaatgtgccaaacgcatttcatgtgcacgagccgtgactcattgtcagtcacctggagcctagggggctttctgcattaagaaatcttttactcctaataatgctgttttctggatcatgaatgaggctcagccatggctgtgctaaatacagaaatatctgtgttctaaaatctccatctctacaaaattaatctgatgctgatgcaaagggatccatctgccgaacatttccatcccatgaatatgggaaaaggggcagatacaattgagtatgcacaggtgcatttaaacatttaaacaaccctttgaatgatgagtaggttgagtatttctcaatggagcaaaatgtgtctgacatgccattgagcaggtatatttaaatgatttcccggttcttccaccacatatacagtggtgcatattttcttatggaaggtcttgtttctccatctgtatattgtgctccagagcttttgcccccaaacacacccttatatagttgggggatgaggagcactcagcctcgaggttgaattctgtcccttattccgctcactctctctttcctggcctctgtttcttcatcggtaaaatggggacagtaataatggtaagtcataagatgcttataacagtcaaatttggcagatttgtgaatattgtccagcatagcttttggcacataaaaggagctcttcgaaaatgtttttcttctcttgagggttttcagggaaaaggttttgaagaaaaagatttcaagccttattggattaaagtcatgttcgtacctacagattgttggttctcttgagagcaggcactgtctggtgcagactctgggagatgtcccctgcagaaacctaagttttaacataacccatgctaattacatcatgtcagtgacagtgggcatggcagagctgctcccgcccttgacagaaaatagtgtatgtgatttgtaaatgaactgggtgctcacatgttctctgggaatgtaaatattgactctaaggaagaactaagataattttgtggtgagatagtttctagttgtttaggctttcattttgctttgttttaattgcacacacattgaaactatattccagccttggccaaacttcagtcattcagacaccaccatccatccttctactatccatgtttttatttaatatttttatttaaatcccctcttttaaagtgtaaacttattttaaaagcaaaccgtctctttcttacataaataggaaacaagtatcacatgcagtaactagaaggtggccttgatgtgcagtgaaaaacaacatcttcaaatcaactgaaggctccaaggcctgaaacccatgtgcaagagggagattagcaagtgtgtgagagccgtttaagacactttcacaccagagaggttctccttaatatagactcctgagacaagttcggaaggttttcttgtttggattcttgtgtcaacatattttgtagattagacctcatttaacgtcataatctcatcttttattaatatcattatcattgaggggttttgttgcccctttccataaaatggcaccagaaacaaaagaaaataaagttctacacattgctgggccaaactgtgaaactgtgtttaaaacaaaacaaaacccacagttttcagtaactctttctcagttaagccttcaggttgagaacaacattgtcaaccgggcataatattaattccaaacccactgaaaggcatcagccagagaaaggttgtgacaacccccgccatcccactaattgtggttaattgtgtctgcctgtgtgttccagttgcttggtgtgcctggggtcttattgagggtaggaactgtgtctcaacactactgtagcatttctcttgaattcttagcctagtaagatgcatatggtcaattccatcaatagttcttgggtaaacttgaagcctcccacagcttgccaaacagagcagacgcatgtccttggaagcacttgtgatccctttgcgtaggctgtcaaacagtgcagctctgggctgttcctggcttgcagggttaatgtcgaaactcataggcttaagagagtccatgattaagaggttattgtaaagcttacacagcatatttagttaattacagttcttcgtttaccctctcctgccattttgcatttgcaaggaatagagggagcctgctgtgtttgtcttggaatggattctccaaaagcttagagacctacttctcccctttccttatcaggtcctctgggtcccagcccctgacccagggagcgggaccgaacaggaaaaagaggaggaaggggagtttgctcattcacatttctgtgtctgagtggctgtgtctcttgctgcaaaagggccagtgaaggatgagtcatctagtttatccacttttgcctatatatctgttttgttggagtagataccataacttgagagtataccgtggtttattctgtggagagttgttaatgataaagaaaatttagtttttcaaacaatatttttgaatcttgccatgatacttagaccttagaagaaacttatcacactgtacaaaaattaggacatttaagattcatatttagtactttgttttttaaattatctccctgctgactttccagatatgctcctggatttttttttttttcacatacccaagcagctttccctccatggtatagagctagccaaagattttatttgcattacataaacataactggttatactacagagggctatttttggcaacagaatttctgtatttgattttttcactcctaaagaaaaaaaacatatattaaagatataaactttttaaatgtaaaaattatgcattttcattttatagaaaatacaggaaaatatgtgacaaagtgaaattctataccccaaagataatcacttaagattttggtgtgttttttctttttatgcatagaaaaaaattgaggtcatacaatttaactcttgagtttttgtatttttgcttctcttgtctgcaagacataagttgaagtaaatggtatttaatgttctaaaatcactgattacagagttaagtgattttaaatgatattttaaaattttattaaattgcataccttttgaatcataacaacatagtctccaatatctttaaatattttttcagaaatttaatgttagtcataagacataagacacaacctttaaatagtgaatggcagaatggcagaatggcagaaaattgcccatgagattaattggttaagagtgctgagataagttccagctttgtaattacttttctgttatttacggccgttagtttgattacatagtttgtaatatgaggccttggatttaaagtatatcattgttaacttaaaatgggaataaagaataaccacatgctcaattttattgccacacagcaatgaaaaattcatatcataagatgagaaatagtcacagaaatccaacttaaaactagtgatcaggttccgagcgaagatatttcagattttattaacttgaagcagctgttgtctctaatatgacacaccccacagaaatggaataggtcttataaagaatacttgtgttttttcttttttaaagcagctggcttcccatcattgagctgtttttgagttcaggaactccagctcttggccttttccttgtgagaaggaaggctgaggctctagagatttttccctgtgcagctgctgggaggacagggtgaaaggggaaagagcctttgaccaagttctgtgcaggatctgggcacagtggtggggggattgggaaagaaggatggataaaccctccctgcatctatgagcaccagccttgctcctgggcatctcattgtcataaactctcagtaataggagggacaggacaggggacagtcccaggggcatgtgggaggggctggaaagaggaaaacaggcagattccaaggggcagatgccaggagggaaggctgctcctcagtcaggttcagggtcccagcgtggaattccaggaggagtacttgaatctcagcctccagcattcttgaaagagactggtggggaagaccctcaggctggaacgtactggagttcctggcttgctgcagttgacttgctgcctgatctctggtgttcttcaaagagctgctcagatgtcattcttcaggtctgcctttgattcctggcatgaaatcatctccatgcactgggtggttgtccctaccacagcttctagttatgtattagcatgattatttgagtaatattttcctccccatattttatccaacattctatccccagcaccaggccctgtacctggcatcctaaagtccaccgtaaaaattcatcaaaggaaaagatgaccatttaaaggtcattttacttctctttgctttatttagctttctgaaatcttttgataaaaatatatatggaaattttggtagctcttttttgggtgagatagcagtgtgttttccaacaggaaaaggacaaattactatttgtattattgtatatttattatatttcaatataattataaaataatttgctgtgttatataacttttatatccttagtttctgaaaccatttttggaaaaaatatcttaactttcgatttaaatatttttctcaaatgaaaaactttcatagattatgattattacttattaaatgtgagattttcttgatgtttaagccactagaaaaatttcaaagagggaagagtgtgttggcaattattatgttcattttatgatgaagatattgaaagttaagaggatttctcagtcagtggtgaattgaggaaagaaaattgggaggtggggagcatttctaggaattttctcttatgaatccttaagcatattttgtaattattgccttttctgaatcaccctcttcagtgattagcacagtactctgcatgtattaagtactggagttacaattgaatttatgtgtgtaagaacaataaggatgtggaaggaagaggtatttccagctatagataatcttgtgtttaagcctattctttttatttttctacattttaaatagctgatttcaattcagaaatagaaaaccaaggttaccattgactttcctttcacctctccaaagttcaaatcctgaacttcgatcttttcctagagttttctcttctcctgctgttaaattcactgggtatattttctgtcagtgttacctccccaaagtataggacttggtacacatgccgttgattgagactcaagcaatgtggaattggaggtcatcatactggagcaagcctgaagacaacccttattttccataaggaaagggtataccaaagagaataatacttttaacaaaatgtcagtgggaaagttttaattacttcagagagttggattctttctaaacatcctggactgcaggaatctctgcaaattaggattctccctacaggtttgtggattcagagtttggctctgcatttcaataatcattgcagctgttttatttgttgttttactttgagaacaaaggtgtttcttccgagagcttccccagggcctcacactcaaattttcttcctcgtcccaagtgacatggcaagttttagtaactagtgcttgttctagggaaacaaagttgtggctccaaaatgttccttaaaaatgtcagtgattatggtataatcatcctctctgaaagaaaaaaaaaattactggctctgattcaaaaaataacaacacattggctataaatcccctaattgcctctgaaaagcaaaaacggacatgtttaatttttctatcccccctgcaacttatctgctttgtctggtgattaaaataggcgacagccagtcaggcctgttggaatctggtcccttccctgccactgagggcttgggctcagaccttatcatgtggaaaaatgtaagagaaaaatctaattgttattagacatactctccaaaagtcacctagaacagaattgttctggttcacccatttggcatgatgtaaaagcaacacgttttaagaatctggtagtttgatcatcatggacagtaacttctcataactcattttacggataaattaccaagacactgagaatatttgtgtgaaagagcatattcactgccagtgagtgtggatgaaaattgtggaatttggcttattttttttctcttacctttatgtcttggagacctttctaagttgggatatggaagtctttacctcagttttgaaaactgcagtgtgacagtccatggtatagatatttatttccttggccatttccctttgaacgtacattatggtttgtttctgatttttcactgttgcaaacaacgctgtggcccatgcttctgtgaagagtgatgatgatgatgatgtcgatgacgatgatgacagcagcaagcggacacttacagagcacttatctgtgtctggccttgttctcatcttgggagtgtgtgtgtgtgtgtgtgtgtgtgtgtgtgtcttctctcaacaatcctgtgagatattcttatataccttcttattctctttttatatttgagtaaaatgaggcgcagagaaattttgtgacttggccaatgtcacacctcgtaagctgcatactggatttgaatccaggtggaacctcatgggtatatataagattgtaaaaatacacgttccccttcaccaggcctttcttctgacctaagtggtggccattctccacatcagcccttggccctctattctccatctcaggctgcatataaccttcactcagcagctctgtgctggtcatgcccagatatccaggcctcatgggcctctactttgtacctccagctgccagtgagatagttgtatacagttgtcagtttcttccttccagccccattctttctcattcttgtttccatgagtccttatgcccgttgtggctctggccagcatgaacttcctggtcatgtgtgtgccatgcgtattccagcatctcctgtcaccctgtccatgccttcctcacctatccagatgccgccactactttgccagagctgaagtagggataaggtactccctgtcaccttggcctactcctccagcctgtattgacatttcttcctgcgtgttctgaagtcacaccacggaattcttaaggatatacactgtgacattagagggcttgagttcaagtactgggtctgggctactttgctttgctgccctttagtttccttgtctctgaaatggggataatagttctttttttttttttttagatggagtcttactctgtcacacccaggctggagtgcaatggtgccatctcggctcactgcaacctctgcctcccgggttcaagcgattctcctgcctcagcctcccgagtagctgggattacaggcatgtgccaccacgcccggctaattttttgtattttttagtagagatggggtttcaccatgttggtcaggctggtctcgaactcctgacctcaggtgatccacccgcctcggcctcccaaagtgctgggattacaggtgtgagccaccacacctggccgataataggtcttacctcatagaatcaggaggaataaatgagatcattgtgtcaaccgtgttaattatcagaagcgtaagcactattctgaacttggtgcatgaccttcccatattggtgcatttttacaggctatttctgaagttaagacatgtccgcttaccttgagtcaaacatgaaatgtcttacattttcaaaacactttcccttccttgtagtctctactttaacctttaattattccattttatatgttagctttctctctttcaattatctggactagagtcacctgatactcctctcctcaccagggaatcagccaccgtggtgagcacgtagtaggttgtgtttattattgtgtgatccttagtgagtctcaagtaggctgaagctgcatgatgagtcatcacactgagcaactgtgctcggtaggactgtgttgtttatactctaatagaaatatttaccttccttctgaagatctgttttccaaatacctatttgggcatctcaaatcctaaacagtgtttattaatcatacttcttccaaggactagcacctgttcttcttgggcaaataatccgtaaacatacatctggataggtccagttagaattcactaacataaatagcgatgccttgtcagtaatgttttaatcacatttctcttaagttctgcagaatctagttgataagaatgactgttcttttgaaagctactgtggacacacacactcacatgcgcaaaaacctcatacacaccataaacatatgttctttgtattttgtatttcttccagagaagaaaacaccctaattttacagggtcatgaggaatgaatgagataattgtgtaaactcctcagtgaatctgctgcttagtccagttattatccatttaaagttaatcatgaagacacttcatgaaggagaaagttttgagtggtgagaaagttactagggtagaagtataatagtgattatgtatataatgctatctcccagggactgttctaaggtgtttgggtacacacacacacacacacacacacacacacacactcctttaattcccacgtgaaacctaagaggcaacatttaggtggggaaactgaggtactgagatgagtaactgggaggatagaagacgaggacgtgggaaggagtgagaaaaggaatgtgccccaggtgattggagtgtttcgctttgtagtgctgaccctaaacttaggactgtccacaaagaaggaaaggcagtgaagggggatggaaggtcataggaatcagtcacttggacaggcatgggtatttcagctcagccactgcctagcagtgtggcattgagaattactgaccttctccagacctcaggcttttcacaggtacaacaggggaaggataatggcctttgtgttgctatgaaaaataaataaaatcacatgcaggtataaacataggcttagtctactgcttcaagaaggtagcatctcaaaaatatgaccctttagcacttttaggattttctctgtaggcttctaatattagaagtggggaaataattatatgtttctttttttccttttttttttttttttttttgaaacagggtctcactctgttgcccaggctggagtgcagtggtgcaatcacagttcgctgcagccttgacgtcccaggctcagatgattctcccccattagcctcccaaatagctgggaccacaggcacatgccaatgccaccatgcccagctaatttttttattttttgtagagacgaggtctcactgtgtggcctaggccagtctcaaactcctgggctcaagcgatcctcccacctcagcctcccaaagtgctaggattacaggtgtgagtcaccactcctggcctccgtaagtttcaaatgatgcaaaaggaacattaaacaatgatagccattactttcatttgacagagctgatgattttttgctacattgacttttcttggttccctccttttcttctttctataccaaagtatttcaaagctcatccaagacagtgtgtcattttcccctacagactgcagtatccacctctcaaaaaaatacattttcttaataagccacaacaggagtgacaaaattaaacctaaattaaaaattggcaatattacacctttggccctgcacatacagggatgtttagctggtttacttgttccaagtgatcttgtttcactcaaatttaaatgaatgacatcacagtttttacaatttcaaacacaaggtgttccctgaaagcatccagcgttattctgcactgttcagttttagctagttttctttctgataactctcattataaacatttaaaagaaaaagaacattttgcaacattctgcttctccagggcagagacacttcagagtattgctgtctgtatgacccttgttccaacaaatctgctgattcctgaaacagcgtgtttttgttttgttttggttgtgcttctgtttcagtttattcatcctttccttaccctgatcattggcacttctatttctttataattcacaaacctgatattagaccaggacatctttgggtagacgtcaccatatacaggtgtgccttcattttttagaaaccagcatttaatcaataatagtaagttgctttggggtaactacttgcagttattggcaatgtctgctgctgtgagatttggcttgaagctgcacagggcaggtctgcttacaacagtggttttcaattttgcctttgcagtcaaatcaggtggggggcttttaaataaagactgattcctgggccctgccttagagatttctggtttaattggtctagggtaagaccaggtattgattgtttttaaaaacaaccctccaggtgattataatgtgcagccaggattgagaaccagtgccttagagtgtccattctcaaacttgaacgtgaagcagaatgacctaaagggcctgttaaaacgcaggccactgggccacaccccagaatttctggttcattaggtctggggggttgaggggtggcggcgagactttgcatttctaaccagttcccggatgattcagctgttgctagttctgggaacccactttgaaaaccactggcctgcggagatctttccagtagctttgtaagattttataacaagaaaaaagacaggatttcctgtgcttttaagtaaaacaactgcttaaggcacaaatattaaaatattatgcttcccggttcataggcaagttggaccataccctctgtttgctaaggcagcatctgcactaacaggcagccagggcccaggatctgaaaggacatggattagaggcaggtgagaagttggttttttaaataaaaaatgctacaaggatctatagaattgttactaaggttagcaaattacctatggattgtacagctctactgagatacgtagcttaagatgtgaataattccctgggcagcatgaaatatggcacagaagtacgaaggtgactcagacaaacatggtacttgatcccctaaagagggcagtttaacagtagaatgtactgcctgtgatgagacatatccatttcttatttaaattcacgccctacatttctctttctccgattcttgggacttctagttccatttccttttccaaacccttctctccgtctttgagtgaaaaaccctttatgaaatgtttggcaacaaaggatgccacctttgccgattaccaggagtgtacttgctgcatcatcgtccatttgtcctcacctgattttatagaagtgtgaacttgtataagcagctgttctgtgtccaaagacttgggatttgggcttgcagggttggactttgaacctaagcctgcagcagacagggcagcttgattcactcttcctgccatgcaacttctctcgggtacagtgccctttgctagctggtagagaagaaaagagcctattctatccatttgacagaccgctaatgaatagtaatcatgaaaattgaagtcgtgcactgccactgcattcaccattgttatattagcaattcctggacttcatgaacagagcactcgttattctgcaattaaatgaaaaataatggcatcgcttagctataaggaaggaaacgttcaagtgcagcctctgtataattaagcttaacattattatcaacagaaagtgattgtagttgtgttcagaggcgagaagagatatgccaccaaccatttgacctatcaaaagaaaatggcttttgtgatgtttgatgttcttcctaacaaccagctttgtgccttgcatggggcaggtgccattttctgcaccattttctctcttttccagctgttttaaagttctttctcatcagttctcatgactgcctttgtaacacttgtctgttttccatttttccttatgtcttcaccagcatctgttgtcctgctttttgttttatctttttctttctttggcgacaatctattttcttgactcagacacactggctttctgacataaaattaaaacaatccatttaatttttaactaaaacaggtgttgagtgattgaccctatcaagcagctccctgcagaaacctcatttactactagcttctttattgccccctcataattcattagcttaataaatgcttgtgtgaaaaggcagaggccaagattaccaatcttacaatatggatgtctgcccactccctctccagcccacatcccagggaagtcaactaggttgagctctccgcaagacagtcgaagctccagggtgtgtgcttcaaaaagcctcaaattagtgagtgctctaaagtaggatccctcctttgcttcagcatacagagtgttcacctctcagggacatgctgcctgcatcccctttagtggaatctggggaaataaaacgtctgtatcttctgcttcgtaactcccagcagccagcaaaatattcaatgttttggagctggttacaagaaacttccaaatcctcaaacatcatcagagaaagccacagaccccaagcgcctgtcacatttgggtatgtagtgcttgctctctctctacgtagcacctaaggttagctggtggatatcaaagccccatagaggaaggggtgtgggcgcggggttgttggcctagtcttaatttaggttcagcatatgtctgaagcttcccccgctttaacattttcacagagcccagacttatctcagcaagcactccacaacctcttcgttctgaaacccctgtgtattatgaaggaaatgaaatccatatgtttctgattcatttacatgtagctcatcaaaatgtagttttgtaagagctctttggtgtccaagaagcctttggagcctttttataagacttttaaccctcccccgcttcattcttcttagaaccaggaagttgggacttgccaagagtaaataaaagcaagcttcagagttgactctggctctggcctgacccatctctggtctgagtctgcagtggacttagcttcagcaaaaacagaaatgactgtctttaccctttttctggagccatggaagtaggcactaatcccacttacaccccacgtgacagtgagtttgggctcacagcatctcttggaggcagccacttgactctatgtagttatttccagctgagcctcttctctctgtcctgtgagcagagagctgatagggccagatggccacacctggaccagaacctcgaggaggagctcctttaagcagtgccgctcatctacccgcttgcaggccactgcactgtatctccaagactttccaggccagattcttaccaagggactgcctatgcatcagggacttctatcttttcactgggaccatgacagaggcacccacaactataccaggtttcatggtggtattgttggtgctgctgtcacttaatgatacttttgagtgtttagtttttcttcatcaagaaaggcttataagctttaaagaaaacaactatctactgccatgaagattccagagcttttactctgaaaaaccacagaaatgaaatgagtcaacctgtttccagagttcggctagggagaggttgtggggtattttttctcctctatcctaggatgatgaattatggaaagccattcaagagcttagtattccttacttgggctgttgtcgtgagtggggtggaaggaattctgccctcatctttgcacgtcctggcttgtttccttgattcagaatggtgctgtgcctttcagaggcagaacctgggtacatggaaatgcataggcatgtagttgggagtagagctggacctgggagttctcacctcatcttccagctgctgaactcaggctttttccagagttttatttcttcatgtggatgcatacggtgtaataaaaaatcatccgctcacttacaaattatatcacctccaagcattcatcttcagaaacacgcttcatcttccaggatacagaatttgataaagtcattgctcagcttcagcgtgaagacactgcatttaaattttaccatacacattttgtgttatatgtaaatgggagaatcattctcagcagaatttttgaaatatttcagggcaactataaaatgttttagacaagttggaaagccatctgaattacgtattgcagaaccttgaaatctgagcttcacctgaaatcccatggcaggggaagccattacaaaaaagcttgtattgaagctgtttcctcactgatgaatgggcatggcacaagtatgctgggcttatttggttacatttatttctcaaaatgaacaagccagtacttttatgatctaaggacagacagctgtgagtccatcccaaaagtactttcaagtggctttgaaatttcccttatagacagtgacgatcatttgatgcaatgtggtggtgagattgtcttcgttttgtgttgcctccaacaggtccgtactctccagtaatactggtttacagataatgaggcactacacacatcttccttttaataccctcactgggtcgcctgtggtatcatgccaggtggagaaacagaagctaaacttcctccagtgaatttcacccagagttattcattcattgatttgctcatttattcaacatatattgagtgcctaccctgtgctgggccttattctgtatactgcggacacagtatacagaataagacacaggaggcccaagtccaagacacaggaggcccctgccctcaggcagctactgttcttgtggatggagcttatttgtattttagcagtaaaagggagtggcagagccggatggtgacctgggccttttagctttgttaaaaaaataaaagatcctccgatcctccccctcacctcccaccaacccctcctccccgcaataagtgtcttccctcagaacaacccttctaatgtggtgtggaaaaaactctgccatggccctcagcaaaatccacacactaaaagcctttgagggaaaagcattttcatcagaaaattgctgtggtcaagaagtttaaagatccagcgatttttattgacatgttttgagtactttctagttgatagagtctcaaaactggaacttctggagtgtaccctgtgaaacttcttttttcttgtaggtcagaatggttggacattggcaattcctcatagtgcagaccgtgacatttgcctcctctttgtatctggtgtgtagtaagtgctcagtaaacatacccagaattgctgttatgtcccaggcactcagacatctctgagcaatcttaaccatttgcctgttgtccagttgcattttttttcttacgtagctaaagttgtagaacatattattaaaatttggttttcataaactttacagcagtagctaccaggatttttcacagtgtgatcctcccttccccaaagagtttcttaaaccctctgatccgcagattatgacctttctagggaagaggttgctgttattatcacctatggaggctttaatgaaaggggccctggtggcacaggagataaagcagacttgaattcagcaccatccgtcgtggtgggggcttccactcatccctccccaggccctgtcaggagacgccaggcgcttggcacccagtgtgggctcagtaaaggttagcaatgatttttgttattgctactaaatgccagtataggtaggcatgctgtaaaatgaacaggataatctaagcggaccttttttttccttttatttcttcccttttacatcatttctattgttttgctgttatttgtatatatgtgtgcatgcattggagatggggaatacagctacggaggttttgaagaggcacagtattgggtttagttttcatatcaaatctcacacattctgaaatctgtgaagaaatgtgtcacatggtgatgcctggcatataatcagctcctcagaaaatgctgtgattaacagtaactccaacagatatttccttctcaaaagaaaagcacatgattttatagcatttttaaatgccagggcatctcatcagctcagtcttttcagtaatttaaaaaaaaaaaaacccagatagtggaaattcagggtagtcaatggaaaaaattcaataaagctgaatatctcggcaccacagagtggtgtcctttgaatgtttgtttatcattcaaatataataacaccaaaaagaaaaaagcatatgaagtgacggatatgttaattagcttgattatggtgatttcacagtgtatacacctactatcatatcaactagcataccttaaattatttttatttgtcaattatacctccataaaactggggggaaaagccactcttttaaaggcttaataggaaaaaaaaaatccaaaaatacgtaacagttcaaaatgcattgttaaaagagcaagtttaaaaatactgtgtataatatggtctcatctgtgtaatataataatggacatgggagtagaataacagtagaaagaaacacaccaacggtgtggggttggataagcacacaaaactttaactagttcctttgtttttgagacagagttgttgcctaggctggagtgcagtggtgcaatcttggctcactgcaagctctgcctcctgggttcaagcaattctcctgccacaggctcctgagtagctgggattacaggtgcccaccaccacgcccagctgatttttgtatttttagtagagaccgaggtttcaccatggtggccaggctggtctcaaactcctgacctcaagtgatctgcctccttcggcagagcgctgggaatagaagcgtcaaccaccacacccggccttaaattagttctttatacatgttttattttttaaactttttgtaatgaacctatatttattttgataataacagctaaaactactgaatctcagttaggcaagttgaacaccctttttgcttgttggtgtctggtcagttttaatagtctgttttagatgttaaaggtatcagatgttctgtgcaatagccccaaggattgactttgctgagctaactctctacagcgcagttcatttctaagttaaatagttggtccagttttatcagcgtgctctagcatctgtcagtgccagctatgtttacagctttccttggaattggactgtggaagagctgagaagcctaaaggaaatattgaatcctttgtctgttagaaaccctagtaaagagaaagagagagcaccaaatagcattgcaagcatgcgagaataaattcttccattgtaaacatgaaagaacaaatttaaagtctggatgagataccttttttcttttcaatgttaagactcaattttgcctcatttgtagaagagggaaccccctcacctctcaggtgctgcctacatctcactgcagaagctacctttttgcttctgaggaggtgatgggccagttaaatgtgtataaggcagttctgctgtgctcttgggaaatccagtatgctgggtgctcacaccccagtgctggcctccaaggtgcagggcactggacttgcttgcctgctaaaaccaaatcctttgtcccctttctgctctggatgctgtttgtcttggcatgccactcctaataacacttggaaatagaaaacaatcctgaatccttggggtttctctctagatgtcatctttaccttcttaaagctgtctttgaatatgagcagtgtgtatttgcatttatccaggtaaaatattaatcaccaaatagagtgtggagtgtccagaagtaccagacacttggagtacacacaggaaagtatcttttgctgtggcaaactccagttatggaaggggtgtggatgcttgaggttcctgaagtaccaaatttgatgatgacgttccacatgactgtatgaagttaatgtatatatgtgtgtctcatgtaatgatcttcagcaagagagtcttttttatttttattttattttattttatttttttgagatggagtttcccacttgtcgcccaggctggagtgcaatggtgtgatcttggctcactgcaacctccacctcccgggttcaagcaattctcctgcctcagcctcccaagtagctgggattacaggcgcctgccaccacgcccagctaatttttgtatttttggtaaagacagggtttcaccatgttggccaggctggtctcaaactcctaacctcaggtgatccacctgcctcggcctcccaaagtgctggtattatagatatgggccaccacacccggccagcaagagagtcttaaaatgcctttttttatgtcatggtccacgtggaagacttgtttacatttaacctataaatctcctagaacaatcagttactgaagatccactgagacaatgttgttggcctgggattgatgcccaggcagtgtgattgtggggccgttgctcatggcaaccatgtaaacaaacaatccttgtattcttgcccaggtgctggttacctgttgctttctggtcatctagagagacctgtaaaatatttctgctgatttcatttttgctttgcctttctctgcccataattatttaataaagccatcaaagtgggaatttcattgtgtacttttttccttaggttgtttataggactgtgaagacctgtcctaatgcaaccccattaatagttccctctgcagaaaaactccaggttattcttatcttctctttttttccccataattttaggttctaatggcatctcttttatcagtagctcggggtctagaatatttccaaaggtcttttgaaaattattactcaaatactaccttttagcttaccactctgctgaaactatttcaagcacccataggtttctagcatttacaaacatttacatagtatgagaaaattggaaagtggaaataaaataagatgtggtctctgcactcagtgacctgtgcaatacattgagctaaacaccacagtgtaaaatactagatgcttgaaattgctaaattagccacttaggagactgtgtggatttggagacacctagaaagtcttcttggtaaagatgagactttgctaatagttattcaaaaaaattgctatagaagtccaacatgtatatatcacatatataatgtagaaaaatgactggaaagaagtagcagaatcccagccaagtgacagcatgtgtaatgattcagagcttgcagccttaaaccagaatgcctagttcttcctattactggctgttggaccacataactaaggttacttaacctctctctacatcagttttcttgtgtaaaaaggagataattatggtacataactcataggcttatgtgggttaaatgaattaatatgtatcaagaatttagaccactgtctgacctaaagagtactcaataaatgttagctatattgggcatatttaaatggtgagattaggggagattatattttcttcatagtcttaaattttccggactttctacagtgaacatgttggactttgatagaaaaaaatatttctaaagtcaggtctttcagtaagcttttaaagatatgtataccacaggtgagtcatactttgatgactaaaaagtcaatttgagcatattttaatggaggttaggcaacattttttgctgacattcaattcaaaattttttattaacctccataaatggaattaaaagttttccacaagttcccaggacccctttgcttcttaagaagttttagcatacattagagtagacagtttgattccctttgtcatttgtaacagtaaggtatagtttaagaattgggtaaacatgcatctcaggggtaatgtaatgtgttacagttgtttccagaaaatattaataaatgtaagtgtttatatcttcttagagtaactttctgctaaattgtagtctctaatcatttgttatactcttgtgctttatcattgtgttagtctgttctcatgctgccataaagaactgcccaagaatggataatacatgaaggaaagaggtttaattgactcagttctgcatggctggggaggcctcaggaaacttacaatcatggtgaaaggggaggtaaacaggtcattcttcacatgatagcaggaaggagaagtgctgagcaaagaggaaaatgccccttataaaaccatcagatcttgtgagaactcattcactatcacaagaacagcagcatgagggtaaccgcccccatgattcaattaccgcctactgagtccctcccacaatacgtggggatgatgggaaccataatttaagatgagatttgggtggggacacagccaaaccgtaacagtcattttataaaatactacatatgtccaatatagagggtagttcccttatttcccaaacaagattcaaaaacatgttttttggttttgtttttattggaggggagtaacctgaacagaatatgtaaatgtttacagaggcatgtgaaatacccattcataacatttttttttagctatatatatttagggtcacagataaatcacatataaaatgctaagtgagaaatactgactttttcctattttatgagaatttttttaaaatttttcttagtatttaacaccagttatttgctttgttagctcttgagaactgttttttttttttttttttttttttcatccaacagttttcagagcatctgtcctcacttttatctaagtcgttagagacacggcacttcctgaatcatacatgtcacaggaagtattatcctgagccatgaatcttcatccgtgcagtactttaacatattttttccattccttttatgaaagtatatttatgctcaccacaattaaccacttactgattgctttttaaattaatcttaaaagttgttttcagtgccatctgatgcttggaattgtgtagctatacctagcaggaataaatactaagtctgtgtcagtattcttccccttggtttcagttatctattgctgtgtaaaaaaccatcccaactttgttgcttgaagcacccaggattcattgtttctcataagaattttctgctggtctcatgcggacttgctcgtgtcctagctgggatggctggattgttcatcttgcagttggtgctggacaatggtgggctctctctcagtggctttcatgcacaaggaggctcacacaggcttcttgatacagcagcctcagagcatcagaagggcaagagtggatgctgtctggtctttgaagtctcactcagaagtcacctgttgtcacttctgtgttctattagtgcaactgagtcctgaggcttgcccaggtttgcactgaggaaatcgattccacctcttgctgagaggagcagcaaagaatttatcgccacttttaacccactacaacctcaatttcaactgattgtctctaatgacttcttctgtaagcatccaaaacatcccttgattgaaactatctcaaggtgacctatcttccttcaacaatattttgtggttcgaaactatgtcattaagagagtgactttgaaaacctatataaggacccagatgtgaggtgactgcctagtctgaggaataatgactttaagttatatttgtagagaggtggtaaagccagcgaagcagacccatggagaaatgcaaatctgtcatcagccttgaaggatggggcaaatttggtggtgccctggttaaggaggaacagcactgtgtcttgctggcaaagcctaggagactaatttgtaaaattaacatttctttgagaatatgctttgttactagaaagcagtttgatcaatgtactcttgtataagcaactagattaaggaacaaaagagacaccttaaagaaacacagtgagccttcagaggaggagagccttcatatcactgtaattagcaaacgtctcttatgcatcagttgggctgccatgaggctgtaattaccaggtcttagagtttgcctctacctacatcattgtataaaatgaaaaccagatgaaacaatcaaatgttctatgcaggagaaaaatggatgcaaaacaaggcttgcaaaactcttaagtgctctatattgctaaaggttaactgcattgcctgacataaggaaaaaccaggaaactactctaaatgaggagtagcatcaagaaaccacaaaagaaagagctcgacataataaatacattattaaaatgcatagtatacagtgtaaaaggcagtctgcaatttttgaattatgtgtcctataaaagtacatcaggtaaatatgtgtaattggagtccctggtgctctggcaaagctcattttgctgaccttcagaaaactacactgacttttttaggagtattattttgatttgaaaaagctcttctttgccagtaaggaaaagtacagtatttacagaaaatgagacaaccacagtgtacttaaagtgtatgtagtgcatgcgtgttctctgcaagaaaattaaaagtctctgtttttcattcagaagtaattagagaatgtcttttgtggctgctggaaaacagatgcaagactcctagaagtctgaagtgtaaaattaaagtagaatgtatcattgggtgtcctaatcttcaggtaatggcccaggcctgggaaaagtgaacagactttgtgttcccagttgtaaatgtgctccatggagtctatgatcatgctcactcaagatgtgacaaagcataaagagtcattttggtccagaaatccctgttggaacattaaactgggtgctgatattgactatgatacctggaaaaaaggcctcccatcatttcttaaagaagataacagttgtaccaggcacaacggttcactcctgtaatcccagcacttcagaaagccgaggcgggcggatcatttgagatcaggaggtcgagaccagcctggccgacacagtgaaaccccgtctttacttaaaaaaaaaaaaaaaaaattagccgggtgtggtggcgcaggcctgtaatccctgctacttgagaggctgaggtagaagaatcgcttgaacccaggagatggaggctgcagtgagctgagatggtgccactgcactccagcctgggcgacagagtgagacaccatctcgaaataaataaattaatttaattaaaaaaaagaagataacaggtcttattggcctttcattaactagtactgtccataatttcagaacattccatagaaggtggaaagttgaggcccttgcctgggaattgttgatgccaaatatcaacacatttccaaatattagactgattagtgtcacaggtttaagccacctggtcaaataaagcaaatttttcacccttattagagtaggttaactgctgtaacaaacaaccgtaacacttcagaggcttaacacaatatttattacttgttcaagtcaagggccaaatacagttcagcaggccaagggctctgttctttgcagggatttaggaacacagtcttctccatctgtggccccaccttccctaggatctctgaatctttccacttggaaagaggatgaagatccaacaggggagatttttatggggcaggctcaggagtggtgtacattgcatctgctcacattctgttggccagaactctgttacctgacccccagccaactgcaagagaggctgaaggctgaattgagctcagagcccagagcagcatcagtgagcattagcagtctctgccctagctttcctgttgaggaccagggcagaaggtcatggcaactgggactctcagacatagttttcagtctgagtacaaaataggaggcctctccagtgggcctggattatatgcaacgaaaacaactcttgcaatacaggagaaattctctgcaaacagagggattaagaccccacctctgcgacccccgtgacctaacagaagtaaagccacttgatcatatttatctcagagtccatttcctttcttgtgtctgatgcattggttcttgaatgtggaaaacctctttcccttgggtagagacctaccaccatgtgggacttaaggaccaggacagctgaataacacgtgtggcattctagacacatggccttcctttcagtctctaaattacgtatattggtttaaagaagcctttgtttcttaaaataagttctcaatgctccagattagaagcagctggaaatctttgggaaggggcagaggtttcagatgtgcttctgtgtatttttttcagtggacatgacagatgctccaaaatgacacacatacctgtcatgccagcaaagccacatcctcagggtgtctgccttagcagcagtgatgcctgggttgtcagggtgggctctggaccaccacaagcagtactgctggggatcccattgtgggacacactccaccatttccatcctgtcaactcctcttgcaggcaggctacaaggacaccaggagaatatggaatggagcactggaatcagaatgctcattcttgatattttattaattcaatgtaatgaagctttcaacatctctgggatgcacagttggttccttggagtcattaaagatagcagatgccaagacctattagaaatggcttacagtggagtgcagtggcagagacctttgtatttattaccatgagcaaaggttacattctaaagaaagaaattacagttacattccttggtattgttgttgttggtgtagctcaatcacatttattgtttgtatgtgttaaggggacctgtctaaatcatatcatatttttcttttactttggtgttacataatatataattacagagaaaccccaaatccaaatccttgtaaaatttccctttacctgcagttaattcctaagccaagttacttcagggcatagctagagtctgctttgcttgtttttgcaatatgccatgcatgtgggtgcgtaataaatggtattctacaatcaccttcaaggtgtacattatgggcgagatttacaccatatgtaacaacagaggactggagaatgacagtttaggaaatgcaggttataagcgtgcaattactctaattatggacctaaatggaacttgacttgttttcactctgtagtcagtccatgtgaactgtcaggcgaaactttcacaagatattctctccccaaaaaggcagctctgtggatatgtgtctgtttttattttctcgagagcctttgctttcactttaagctttgggaatatggataggggcactgatagcccatggcttggctgatacatctttgcctttgctgttactgggcatttgtatcactgatgctccagttaagtctccattcaggtgtagagagaggaatccttggatactgtgagggcatttccaagtccttatttgcatatcttgatgatatattggagtgtgaagaaatgcatgatcatcacaaagtgattgtcactgtattgctctgcttagagtaagccctgctgcaataacaaacaacttggaaaatttcagaggcctgcaacaataatatatttcttgctcttgatacatttccattttgggtcagcagctgctctgttccatgtcattagccttctagaacccaggctaaaggagcagcctgccacctgggtcattgctggtgttaaggcagaaggaaaagacaacacggcagacccaggtgatggtccttagccttaacccccgagaaggggcaaccaatgacttcacaaggcacattgcattaacaagtgacaggatgaagtctgacatcaccagggcagggaagtatcatctccccacagagaggggcagcaaatagactgagcaataaataatacagtctactgcactcaacaagacacaagagtgacttgctcaatgctgtcctttgtaaaccagaagtgttttgaagaccggatagcaaactattagaaagatagaaatgacatctaccctcttttctgagcctcagttccgtaaaggtatcttagaatcatcagtgtcaaaagatattatctacaagatatgaagagaagaataggaaatctgtgaaaagtggagcagaacaagagcttaagaaaggcagtactgccgaggcaagacctaggggctcctgctggcccacagactccttgtaaatcttgacccatggttttctgaacctcttgagatctggtcattagttcccatgaacatattcctttctacaagcatttcattccaggaaactactggaatgagtctgctcctttcaccagaactcttaagtgttaaaataacaaaaatcaacacataaaatgagatgcactagctgtaaaattcatttccaaagatgtagggatgtcccaaattcaaaaaaagagagacggaatttaacctccattggaatcttgactgaacatggaagattactgccaatggaattagcgtagcttcagaataaacaagagtgggtcaactcattcacccactgattcagcccttcattgttatgtgctgggcattgttgcaggtattcgggggttagaggaaaagactgagacaagcaggagccctgcttctgaagcatttaccttctagtgggtgtgacagttaatgatcaatcatttgctcacttgtaaattaattattcaaaaaaacctattattaaatgttggggactcaacggtaagcagaagaatcaaaggtccagtcctcatggatctgcattttaatgggggaataaatagaaaataagttataaatagaaaataataactgccaaattgacatataagacatccggtggtactaagtgataaaaaatgaagaaaggagagtgggggtagggaattgggggtagggactacagagttgtagtcagatgtgctatttggtatagggtggtcaggctaacctcactgaagaggtgacctgcatgcagaggggagaaaatgaggctgatattcagtgaaggaacacaaaatgcagagtggaacacccagtaacacacctatagctgatttctttgccttctctatcctgggtttcttattttgtgtattacaccttgtaagaccctcccacttcaaatgcaggggcaactgatgacttcacaaagatagtggtggttactgtggacatttggtggataatctgtttcttatatgggatacgttcccaacataatcccctaggccactcttgttacaaaatttaaaaaaaaaaacaattttttaaagtcctttgagtttctaatatgccatggatagatatgttttcaattattgcatttggagttcaaaataaaaaaaagattgatatgtgatttaaaattctggtgattctacagctctgaaagtaattgaaatttgtttttgaaaagatttgagtaagtggatagaggtagaagttttgggaggaagttctgtccttcgcaatggctccattgtcaagcaaaattaaggcaagtaaaaattgcagttggcttatgtgctgaatcccaaattagtttgggattcagttgcttttgccttaactttcgccataaacaatatggaaacttgattaagttaacttaattaagagagattgctagatgaggttattagaaatcttttgtaaaatgcttcatttctgatccatttgatgtcaaacattttttcctgtctttgatgttgaaataatcagattaaaatcaacttgttaaatatgaaacctatggacgtaaagacccattgagttaaagacttctcaaagagtttctaggtttgccttttttaaactgtgattttcagtagcagatttgtttgcgaatgcagttagtggctagatttctagattcttctggtcaggaacactctagccggcagtcactacactgaagggctgaatgataaatttgaaatgagatcagatttctcgcttcttacattaccacaatagaccattgaccctctaaacaacagccatggcaatatgtgcccccagcaaataacatggagatctgtaatgcctcttcacttattctcccaggactgaacatgctctttctgcgaggtcatctttgttcttggttgtttctagatgcaattcagggtgtttagtggaaagcaggtagatcttaaagtcatgcagacccaagttccaatcctgctgctgtcggcctgtgaaaacttagacaaggtattttctaagcacctttcttcatgtgtttgccagaagtaacaatatcacagtgagtgtgtaatgaggatcaaagtgagatgactcaaggaacgccatcagcacaatgcctggcgcacgataggtgcccattatttgttatttatgtttgcaaagctggagagatggaaattattattcaggtgtcctgaccttgtttgggagtatctccgcagttggtaggcttgagctgaatgtcatcaaagaagagttttattgaactaacactgtgcttaaaaatgcttggaatttggctgggcgtcgtacctcacgcctgtaatcccagcactttgggaggccgaggtgggtggatcacgaggtcaggagatcgagaccatcctaacacggtgaaaccccgtctctactaaaaaaaaaatacagaaaatcagatgggcgtggtggtgggcgcctgtaatcccagctactcgggaggctgaggcaggagaatggcgtgaacctggaagcagagcttgcagtgagccaagatcgcgccactgcactccagcctgggcgacagagcgagactccgtctcaaaaaaaaagtttggaatttgttgccaatgattcaaaattgggagacttttacagaaaagtctggagttttggcattattttatacaacactctcctctccctgagtccccacagggccagctatcagcaggggctgaaagtggctgcttccgttgggtggagatgtatgtgctgggttcatttccctccttcatgtttctgcctgaaccctgaatgcagctaaagtattgatgacactcggtctagacattaggctgattagactcgatgagcaaatgtgtgtattttctgtgtgtagcattgggaatttgggaggctacatgtaggccttgagatgtgtttgtctctggaccaggaaggcagtcccttatacaccaatgactgaaggagagatgcctccttctgaggagcctgtctctttgattgagaatgcagctttggtagcaactaatcagaagtagtatttgggaagagggttgggacactgggtcaggcagaaagatcagccactataaccagccatggagcacagtgatagatacaatcccaagtcatcctcaagtgtaacacaggcaaacatggttatgatagagataggaacaagggaagattagggaaatagcatcagtagaataggacacatgactgaccgtggagaagccagggagaaaggcaggattcatttgattcaaaacaaacaggatagttcattttccaacaccttttgggacagtgttagcactcctttttttttttttttttttttttgagacgaagtctcgctctgtcacccaggctggagtgcagtggcgcgatctcggctcactgcaagctccgcctcccgggttcatgccattctcctgcctctgcctcctgagtagctgggactacaggcacctgccaccatgcctggctaatttttttgtatttttagtagagacgggatttcactgtgttagccaggatggtctcgatctcctgacctcaggatccgcccacctcggcctcccaaagtgctgggattacaggcgtgagccaccacgcctggccagcactcttgataaagtaaagataattagaaattatagtcaagtaataaccttttccatttatctggttttcttcagagctttatcccttatctgatcttcataacctgctaaatttgtcacaacaaagtaacagaagagttgtcaatatgctggtccattgaacgaattaatgacatctctttcttaaaattcaaagttttgattgattaaattttgaggtacataagaaatgaatagaaaccaaagattttcctgattttctctctaagaaataaatccaaaatttctggtttaaatttactttaaaaaataaacaaaaaacatttgatctgcattgttctcatcacaatttaagagactatattcagctatgaatgccatttacggttttgttcttatatttgacccagatttagcataaccaggtaaaccaggactttttacaagatcactttaatggttactttgatttaaaaaaaaattctcaaagcgccaagaattgccttggttttcataaaaacttgaatatgttgtcattgatactgtggttattcatgttaagttctcaactaatgtccatttctgtgaaggattttgtagggagccagtacataatcgtggttttgtcatttggtagtggtcttatgtaaccacttaatttttattgcaagagtgttaagtcataaaaagtgtctacactgtgctcagtaaaagaaccagacctctctagacatctttgtggtcattgttccagcattccagcgttaacttcaggctgacagagaattcagatcaacagaaccactgtggtgaggccaaaatttgacccccagagtgcgatgggaatttttgttctgtggctttgcactgggctttcgtaatggttatcagagtttaagaaattatgattacatgaatgggtaagaagtaaaatcatgctaataatgatgatgatgatggtgacagctaacatttatggaatgcttacacttgcccggtactgttctgagggcttgctgtgcattaatgcatataatttttacaaccatcctataaggaagggactgttactctctcctatttatagatgatgaacctgaggcatagtgagattaaatgacttgcctaatatagagcatttaatgaagtggcagaacctagactcaacccagcctggctgatgtttgtttttggtttgtttgagggaattaatgagtaagtcaatcaagatgatgtagttggacacaggcactttgaaacagatttcttatctttctatccagccccttggcatcaccttgataaccagctttattttactgtttctgtgatttctttgtcccaccctcccacagcccttttgcttaacaaagtgctttgcggataatagaaagccagtacttgctggcttgaattagaaatggatgatctgagccatactagagtgcagtgaggcagaaggagtcccaaaggtggcagtgcaaacgttctcactgtagcaggggtacagagccatagggggaggggtggggactgtgggcagtgaagaacatgtagcagagaaacctcaggtcacctgtttgcagccctggatagaggcaggtgtttgtttgccctggcttggtacagttttgtcttaatgccttgggacaagcacatggccagtggcaagggtgccggcaccaaacacttgcacggtctctttccccacagctactaaacaagaagctagaccaccaagctcttgagatttcttagtccgtgtttagaagataatcaacaaaacctttatgtagaaagacagaccgtaagattttttccagcagaggtgcttactttttatttgcccacatggaccccggttccaaatccttgctccacagccctagccacagagacacaaaacaaaaacccctgaaatatctgtaagtatactttaaccttgtcagagtgattttggaaaacagggtgatcagcaagttttatccccactaacctttgggttagtgatttttttgtttagaaggtttgctctgtgtgtgcatgtgcgtgtgtgtgtgtgtgtgtgtgtgtgtgtgtgtttcccacaaaagattcttaggactaaatgtgtccactttaccttgccattccccttcttcctccactccaaaaagcattgatgcacagacctcaatgccagattgtgtacaacaagaaattctttaccaatatccagtcccgcaatctagttcatgctgtttcaccatcctttaaaaatggttcgttttgttactttttttgatcttcacaacatggctctattatattcacaacatggctgtgaatataattgaaatccagctggaaatagagtgaagaatagcatttagtgtttaaattagcagaatttgagatcatccttattacttcgtaatcgcatataaaagatcattctctttctgagtcagttgtttattcttgacagtttatccccaagactctctcttgggctaaaactgggccgtgttttcttttggtaacattactctaactttaacagtgctcccctgtatattgcgtgatttgtctaatctttattgatgattgcttgcctccattggccattcttcccattgaaatgtttttctctacactggtagcctcgagactccttaggaagcttcccctggccttcggtaaggttataacagatagtcagccttcctggcacaccagttaaagcaggactgggcgttggaaggtttttaaagccagctgctcaaaatacctgcatcccaggcaggtctaaggaggagagatccaaggcaaccacgtcagtaataaggagccatccagccctcaatctctttagtctgggggagcagcccttgacctctgagcccactgctttttgaccttgacctccatacttctgagtgtcagcaagagcgatttgtccaggtttattgtgtgtggacataagccggtgggcttttggctatgccagcacagagagacctcatgagttgagccaatgaacatctgctcatcgtgggataagagttctctgtagttcgtgttttgcctcatgcgagtaaataggggtttatttccatcctttggtttttaggtcaagtggtctttctgggtggtctgggacatgacatgaaaagtgattatttaggattcctcttgtccttctttcaacaatgccgagcccacattaaccagagttctggaaaatgagtctttctactattaggagtgggcaaattcttttcgtaattagttagaccactttaaatagctcaaagaaagacagccactttccctgaaacaactttattcatagacctgagaattctgagaacagctcagaatgtatgattttttttttcatgtcctagatttaggaattggaaatagcgaggctgacagtcagattctagtacagatggaatttttgattcttcatattttatcataagagaaattagaaacttttagaaagaatcgcctaacctaatatctactgcacattcgaggacctcagcattctagctgccctttactatgaatgcaagatatccgtttctaatggattttcaatattgaattgataagatctaggatgaagtataacttgtggccttaaaaaccatttactggttcatatcctatgcggaggataggaagtgagtaatggaagctgccttttactgagcacctacttgatgccagtccctgcatgaggccttctccatatattgtctcctttcatccttaccactgtgcatcaggaaggttatattgtccccatttcacagaaggtaaaaactaagactcagccaggtgcagtgactcacgcctgtaatcccagcactttgggaggccaaggcaggtggactgaggtcaggagtttgagtccagcctggccagcatggcaacacctactaaaaataaaaaaaattagctgggggtggtgatgagcacctgtaatcccagctacccaggaggctgaggcaggagagccgcttgaacccaggaggcggaggttgcagtgagccaagatcatgccattgcactccaccctgggcgacaagaacaaaactccaactcaaaaaaaaaaagtagctgggcatggtggcagacgcctatagtcccagctacttgggaggctgagccaggaaacttgcttgagcccaggcagtggaggttgcagtgagtcgagatcaccccactgcactccagcctgcgcaacagactgagactgtctggaaaaaacaataacaacaacagcaacaacaacaacaactaagacaaagtttatgggacaggactagagaatatgcacattctccacattgctctgtctgtatgtcctcagttcataattgaataagcttttgtttcatggctacagatttgttcttcatagatatattgtactttgtttctgactgctcctggatgcaaagttgatgtgaaaacctgacaggagagatgtaatggagataatgttctgagtttatgctggtgaggtgctggcaaggctggggcttagaaaacagaagtctccagctctctagttccttatctgtggaatgggtatggggatacttgatgggttggtatgagaatactctgattgaattatgaatatacaagtaaattgatttgatgactccttattcagcatcttttagtattgaggctgtggatggcattagatatacagtggtgaataataatagtgctcattttacaaagggcttattatgtaccagagagcgtattaagtgctttccttgcatcatcacttttgatttcaagcacagaaaaaacatgaggtaggtaatattaaccctacatctacttaagatgaagaaactaccgcccagagaggttcagtaacttgccgagatcacgtagtccgtgcacagcagagctgagattgggagccgacaatctacctctaaagcctgtgttttcaccatgacatcctaatgtgtggctccatctactgacacagagggtccctgccctcaggaagctcacagtccagtggggaaaggacagaagcgaagcaaacataaagacaatgcacagctaagtgccatgaaggaaagggacagagtgagatgagagaaacaagcaaggaaaaccacgtgagactggcgaatgcaggaagccctcgctgagggggtgagacccagaaaatgcaggaggcaacaagtagggagcagcatgcctcgccttggcagggggaccaccatgtgtgagcctagacatgggaaaaatctggataccaggggctcaactaaagtagctgctcatcatgagtgcatgtggttattggtaaagaatactttgagcttaaaacgtattcccaatcagttggaagaagaactctgcagctctctctccggatttagtgccttctctattttgttacatatgttcaaatttatgaacatgaaagggattcagcctttgcttgaatgcctataagtggccacatttcacaaatcctctcccttctcccaaatgtgggaaaacagaaggaaggagaagttttgaagttctgcctccagatatttcctcagtggtcttttatggggcttgattccttagaaactgacatgtgttcataaaacatggcattcctctgcatatatatacacacacgtatacatagatacatgacttaacaaaattataactatgagcaaggaagccctcaaaaaagcagttattataaatgctgaaacatgctatgcataaaattaatgaatgttaatttatttgctctgcttttaacagggccacatcatggaaaccaccagaaaagatttcaagaaaaacctttctgctagtacctacccagaccttttgactctggcatagaaggcaatatttaaaaaagaaattatatagataatatatataattttatttatataaatacatatatattttattataaatttataatttcttatatctgtgattttcatatatatgaatcagatctatgattttcatatatatgaatcggatctgtgattttcatatgtatatgaaagatgaaagatcgtatatatatgaaaatcatagatctcctgcccttctgtggtatgtttcacctcctgagacacactgaatattttcctaaaatttaaactaggattatgttcacttttaatttgcatgcctgggtaacaatgtcactaacctttgctactcctttataaatcgaaattaattaaactggagcttgccaatgaaaacacagccttttaaacatagatttctggtctgtagccccgtctaggaaaaaaaaaatctcttttattagaaattgttgatctcacatcaaagcagcaagagaaaaccaaattctctttcatttttaataaaaaggctttctgatctccaagggcacacctgaccgtgccacttgcagtacaggcagcctgtgataagtggcccacagcagtcaaagcctgtgctttcagagttcactgttttttccgaacttgatctgttcagagaggctaatttgttactcagagggaacttgaaatctccctgtgattgccttgatagctggtggtaatatgcatcactgtggtttttaagcttttttaaagacttactttgactatctttaagagaaaggagttttgtattttcttgctttacataaattaagcctcaactttaagtttgcagctagattgtcttctggtctccaaaattctttgatatgtttacagccttgactattaaaaaggatgatggtatcttgccatgccttcttttttgcaggattctatattaaatagtaaaagtcagcctgttagtccaaatgtttcccaaataccctgaatatagtgccttgtgaaaggagaggtcccggggaagtgtaagcatgccctgtgatatctacttgtaagaaatatttcatttcactgaaactatccattactgatttttgcaaatccaataaattgactcccaggctctgaactccttttacagaatgctttggatcctttgccagggtctcagtgaatgcgttctctacttgttcatttcctgctgctttttgaaaagccttctgcctcctttctgccagttgcatctgttcattcctaaatgagtgcagcttccagaaagcagtggccaaggacatctgagcaatgggagggctgtgtgctctcctgctgtgtaacactgaggttgatgcttgtcttatgaagccattccatccctgtagttgtgccaccatatttttcttcggacctttaaccaactgttctgtttttgtgatcatatttttcacttatttgaagtgctgtagtaaatattttttcatagtattccttatgaccctcagtaaaactttgggtttttttcttcctgcaaagaatccctatacagtgcttttgttgtttgatattttatatgcataaatgtgtgtatttgtatgtatgtacatatattaatgtgtacatatatatatatagctattgcaatttgtgactatttaaataaatggtattataatttgttctaaagtttcttaaggtagtccattatgtaatctctaaataatgagaattgtttctctctttcaaatatctcttccttttggccccgtatggtggcttatgcctataatcccagcactttgggagcccaaggtgagtggatcacctgaggtcaggaattttagaccagtctggccaacatagtgaaatcccgtctctaccaaaagtacaaaaattagctgggcatggtgatgcatgcctgtagtcctgagcagctactcaggaggccgaggcaggaggatcacttcaaccagggaggtggaggttgcagtgagccaagactgtgccactgcactccagcctgggcgacagagcgagacttcttctcaaaaaacaaacaaacaaacaaacaaacaaaaaaaactcttccttttattgtgtttttcttgtcatatttcattggctagaacatcctgtgctatcataacttttcatttagacacacatcattgaggtttgagtgaattcatagttagcaattatgtcctagagtagtaattccaattttgtcataaaatataaaaactgcagactgatacaagtaattcatattaggtacaactattgaagaacaaattatgtcatctctaaataatgagaattgtttctctctttcaaatatctcttcgttttggccaggcatggtggcttatgcctataatcccagcactttgggaggccaagagcaaatcttctgtaaagtgaaatattcctccaaaaacaaagaggaaaattattgcagttccatttatcaggtgcttccaagaggtcagataccaggttcagaggtaaaaactcactgtatttgattctcacatcaaatttctgaggtcttaccattgtgccccttttactgccaaggagactaaggcctagaatgtaagtaacttgttagacattgtcatagcatggcgataaatgcagacccttctgaggagcacacagcctgctcactttatagcactagcatgttttgatgcttatggccccaaggtaagttaaaatgtctttcatttttatgtcagtaactggaaagtctaaaagttaaattaaaaagaattccacttgtgaggaagatcatatctggatgtctatctcatgtgtatctccacatttagtgttactgtcgatcaggggccagcatacttctttaaagggccagagagtcaatattttagactttgtgggttatgctgtctctgtcggaactactcagcactactgacgtggcatgaaagcggccgtcgacaagatgaaagtgaatgggtgtggctgtgtttcaataaaacttgatttatggacagtgaaatttgaatttcatataattttcacatgtcataaaatattattatttcaaccactgaaaagcttataagccttacagaaacagcccatgggccagatttggctcacaggctgtagtttgtcaaccctgctcactacactgaagtcttagaactttgacaaaacagagagggagaggtgcatgcaaccactgcttctacaactcgtccttccccatgacaacaggtatttaacaaacatttctgagggcctgctactgcatgacagccccaatttgggcaggaaagatacagagacaaaacaaatgtttttctggaggttttgtagtctacttggagaggcgttgcagggtggaagaggtaaaataataataataagaagaataattacaacgcagtatgcaaaatgctttagacttacagcagagtgtgcagcagccatcgacttcagcaggcatctggtggatgctgggcttctagaatctcaggccctctggaagtgcatctcaatccccctcagtatcttgtagcaggctaagtctttttggagagactcaacaagtttttaggtcgtgtgatggagttcctgattgcacactgctgtgctggaggcaattcagagacctcagagcagcgagcgagcccagcatctttttaatctggcgccatctgcccgcctacccctcccaaatgcacattttgatcctctgaagcttggcaaagctttcctcagctgatctcagctcctcagaatgagagttaatggggaattggagggctgtgcactggccccagtaaagatgtccagagcgtgaagtctttctgcaggctgagcagaggaggggtgctgacggagtggcacgcacaacaacccgtttaacgagtccaccggcaacccagtgctcctgagggaaaacatacattggcagcacttccccgtgcctgtctcctcctttttctcttgctgacacgtctcacttgaattaaatcctgggctctgccatgccaagagtctttggttgtattcctgctggccttttccagctgcctagcttccaagccatgtgcaacacattccttcactagctcctgttcttaaatgtagaggttctccggggctctggcctcagcccactgattttccagtgtttacacgcaccttgagtgatgttatccttgcttgtagttgtattaccatctgggtgctgatggcttttgaatcagtattgccagtgagacctgccccctagcttcaggtttcttcctcaaactacctccccaaggggctcacctcttccttatcaacacctgcttgcccctgctccccctacccctgctttcatttttttctgtgtgtgtgtgcttgtgtgtgtacagacacgcatgtaatgtaggacctgggagtctttcattgtcctcctttttccttttcccgcccctctgctaattgagacccaagtatctggaggccttgattcagggttgggctgtaaagacaacttggattctattcaaagagtcttttactttagttcactcttgttgttgttgttgtcgttgtcacagggtcttgctctgttggctgggcgggaacatgcagtggtgggatctcggctcactgcagccttagcttcccgggctcaagcgttcctcctgcctcagcctccaaagttgctgggaccacaggcacacgccaccacacccagctattttttcatttttaatagagacaaggcctcaccatgttgcccaggctcctcttgaacttctgggatcaaacagccctcccacctcagcctcccaaaagtgctggtattacaggtgtgagccaccacacctggcctagtttactcttgatatagctaattagcagccccaaagatatataggagacaaagcagtttgatatagctctctgttacctctttcttctctaagcagagtgccaggggtgtctttccatatgcaaacctgatgatgtcatctgcctgcttaaaactcttctgtgttcccccctgctttaagggctgacaggtatggatgggatgcaggttttgcagtgcgccacccccaaggaacgccattctcatcatagtctatgtgaataacacctcctacagctgcaggagcattgtacagcctgtactgctgtctatggcagctctggccagtaaggtctagcagtgcttggccttagactcctgtcccaccacatcacatatgaccctctccctggtagataatcccaaggtttctgagtcagtagttctggggtcaggtataaaaatctgccctcctatcacattcccgggtgatgtgatgctactgttctggggaacacactttgagaaccactggcatagccatagcttgacgtaacttgatgttttttctgttacgactctttactcacttagggcttccaggacatgcctggacatgggctgcctaacccaattttgcaaaagctgggggtatctccattttatagaaacaattaatgatcccacttactctttttaaattaatattgaactctccatgaagcccataaacacattccttgtggaagaacttgaaacagtacagattagtctaaagttccttctttctctcatctttgccccagaagttaacactcttgtcagtttggtatatatcgcttttagactctattctgagtttgctggtagaaaatagccttcgtgctggcatttccccctcctcttaccatgaatcacatcatactgaacctcctgttccacagcttgctgtttttcattcagctgtatgctctggcctcctctttacgctggcgtgtatagattttgctcagtctccttgctcttcacagccactctttcccaccctactttctgcccaagggactccatcagccagtgctccctggcttccaggtgggtgtggccagtgggaggagatcagagtgaagtagataagtgaggttggggtctctcccttcgaggtggtctcatgagggctgtggctgtggagggaagtttcctgaactcactgcacctcttccaagcacattctgccctctgcacccactttgcaattagacctgattcatcttaagtacgtcacttgtctcctcagggaacctcactacataggtgctatgggctggatatttgtgctcccacaacattcatgggttgaaaccccatcttcacggtgatggtgttaggacgtggggattgggggaggtgattaggccatgacacctctgccttcatgaatgggattagtgattataaaggaggccccagagaattgcatagtcctttccaccatgtgaagacggaaggcaacatctatgaactgggaagcaggccctcactagacactaaatcttccagtgccttgatcttggagttctcagcctctggaactatgaaaataaatgtctgttgtttataagccacccagactatggtattatgttatagcagcccaagcaaactgagaaagtaggtatacctcagtctttttttttaagttttaaaaaaattattgtggtaaaatataaataacataaaatgtaccaccttaaccatttttaagtgtacaattcagtggcattaagtgcattcatgttattgtacaacctttaccattatccatctcctgaacttttttatcatctcaaaccaaaactgtatctgttaaacgataattacctatttttccttcccccagcccatggcaaccaccattctccttcctgcctcttgaatttgactactctagataccacataggtggtatcatacaggatttgtctttttatgactggctaatttcacttagtgtaaggtcctcaacattcttccatgtcatagcatgtatcagaatttcctttctttttaaggctaaataatatggcattgtatatcacattttgtttatccattcatccactaaatgaacacttgggttgcttctaccttttggctattgtgaataacaccactatgaatgtgggcatccaaatatctcttcaagaccctgctttccattcttttgggtatatacccacaagtggagttgctgaatcatatggtaattctatttttaattttttgaggatggccatactcttttcatctccagttatgtgtattctttgctttgacctgaaagacataacagttataattgccctatctgtatggtatcccacatcaaagaaacttattttagtcgtgcatgtgaggtcagctgtttttgtcttaaccatttataattttgatgctggaaaatattttggtgcacaaaacatattaccaaagtattatacattacagaaactctacatcgtcttgcttgtgaaatgtgaagccattttcaaagcagatgtgtaaattacagatatggattcaattatatggcatactgaatattttgattgccattgctatagattctacaaatatcctgtagtttcctccctgccattttgagaatattctcttgtgtacatttcattcagccttttaaagaatctcttagcatcctttggggcctaagcctcgctgtgacgttaactttgagggcttttgtttacctagtatctgttcttctataagtaaattttaggtgccaaagagctctcgataattatgcaatgttttgttgagagctctttcacatagaaacatgaccagcatagcttttttcacatagaaagaagacctgtttggaaaatccttggcaaactaggattataaatttaaaagaaactgtgatttgttctgaattgtattataacttgccaaaagttagtcacacatataaattatacaggttaactaagttagccaaagtcacagggctaggaaatggaggatccagaatttaaatgtggatctttccactgtatcacctttctatccttccacatgtggccacctgtgatagggtaaacgcacacacacacctcctttcagatgtttggactgtttcaacatgccccagatgggaagtgaaataagcactttgtattctccctttcgtgatggaatttgggttactgggattgaggaggggccaccaaaacttcagcatggctgtgataaccgagcacagcaacttgtcctcattttccattgtgtgtagtgtttgctttgacccgaaaggctcctcatagcccattccataggcacatgagcacagccagcaccagaccaagaccataaatggatctgtagaaggtttgggcaggtgtccaggactccgtgtcctgtaacaagtgtaaacgttttctggagtgtttgttttaaatgtcagaacttgaggataattttggccagggttgtttttacatttttcatggatgcctatttataggtctgaatctaaatctattttttatccagcctacccagaaaccataaagaaaaagattggtcatttgactatataaaaatttaaaacttatgtatggcaaaaaacataacaaactagcaagaggagatgaagggctaattttctcctttcttaacgtgtttctacatgtcaaggaaaaagacacactacccaatagaaaagcaagataagaatataatcaatagacatgtgaaaaggtactcaacttcattcataattaagaaaatacacaaccaaatgatgttggcagagatgtaacagttggataataggcaacattgatgggtgtgttgacataagcactcataaactgttggtgagagtttacattggtgcagcttttggcaatatctattaaaattaaaatgttcattctgtctggcttataaattccataatctatactgtggatgtaatcacaaaagagtgtgccaagatatgtatgtatacaggcacacatacatgcacacaagaatgctacttgtaacattatgcaatggaaacccaccacaacaatatatcccttcctcccaaattagaaacaagataaatgttaaataacaatacatctatacggcaggaagccctattaaaaagaatgaagtagagctccaaacgctcagttagacagatctacaaactttgtggcaagcatttatagaagttatttcttaaaatgagatctctatactggtatatgcttttatctgaaaggatacattaaaaatgagcagtagttaaactttggggactgttgttttaggtatgtgcataggcctggtttgtcctgcttttattttgtactttttaaaaggacttttcacccatgcattatttacttaaattaaaatttgattgaaatccatgtgaaaatggttctaacagttatagataactaaatttagctttaagtcttgatttcctctctgcaatataattgtccagagctatgcttttggaaaggaaaaaatggagctgagagctgatttccagagtatgatctagatatatcctgggctctgcttttctgtggaaatcgatctttaaaaaatattgggtggagttaaatttgaaatagagattctgtaacgggtggatgaggtcatttccttataggaactttttggagttgggagagaagcacatttatttctaggtgtttaagaagggctgattgggccgggcgtggtggctcacgcctgtaatcccagcactttgggaggccgaggcaggcagatcacgaggtcaggagatcgagaccatcctggctaacatggtgaaaccccatctctattaaaaatacaaaaaaattagctgggcatggtagcgggtgcctgtagtcccagctacttcggaggctgaggcaggagaatggtgtaaacctgggaggcggagcttgcagtgagccgagatcgcgccactgcattccagcctgggtgagagcaagactccatctcaaaaaaaaaaaaaaaaaaaaaagggctgattgttggtggaaaaggaggctctcacccaattacctagtcagaaaaggacacctaggcttttgtgtccttggagtcctttgtttctataccaccaatgaatctgtaggggtaaagtactggggtggagtggttattcatgttagaaaacagtatagggggattttgttttacaatcaggtatgctagatttagatgtggcttccatcgctttctcactttgtaatctagctgagtttgtttactcgtctgtaaaatgggtttatagataatatctccggtacagaattgttaagtgctaaatgagattatgcaggtgaaatgcttgtctttgtaccgggaacatagcctttgtatctgccattattgttggactacaactgtacaattttagctcaagattgtgttcatttctgccaggatgaaaccagcaagcttagttcattgcttggaattctgatagttaattgggttatagaaccagcactggtcaaccaggaaagccaagtcagaagatcagccctcaaccgttggctaggtgcctgatgagaagtgcaaaatatagaagattcagaccaattggttgaaatttcttacatcatatatactggaaatgtaggaatttaagtatatttgtgtattcatggcccttaaagcccaaatcaagaccagaaaagttgcctagataagatgtgagtaaaccctaagtatcactctccttcctcgacccagtcttccagcccagcccttttatcattaacttttctcaaccaaaatcttgatagaactgtattttattgttacacacatgcacagattacacattatagtccatttgcgtaattcatccatctgcctcagacctgccttaaccctgaagagtagtttagggtcatctcacatgtttaacagcatcaattccaacttgaactaagtagaataaacagatcccagacctcctaccttagagacccagcttttcaatcttttttctatcttcctttcaacatgatcaaagcagcattccctaatcctgaagacaacacaagtacttctaagtatcctttgtttgtcttgcttatcccaaccaagggtaattttacatttgcattactaatcaccttcctaaaatgcattgttcctaaaattagattaaatgtctctaaatggttttattttgtttgacagtggcagcctgacccttaaatatcctatctgtgaatgtaccaactagaaggacatagaaaccttgtatatagaaacaaataagattcttctattttgtcatctctgaagtataatttcatcaatgcacttaaattttgtgggtgtctcttttcgggtgcaataaaaattcatccaagaacaacaaactaagctattaccaattaccattcaactgtgggtcagaatattttagtctagtgggagagtaatatttctttggttggttcagtaaaggttcaaaagtctgagaaaattgaatgagctttatgcttaggtcttagttctggacctccatgttaaattcttggtttgaggcagggaaagatgaaaacttacttgcagtgtagttagtgtagagagagaaaacagtggctgtagttaggaacaagtgaatgttaacaagtttgcttctcaggggcattggttaaacaacttcttaactggccagggtccagcacgttaatcattaacctagggctgagcatctgctgcctgatgtatccagaattagtttatcattacctctaacgaccatcttttatggttccgaagagcctctatgcagtctcttatcaccgccatgcctaatcttcatttaccgggagcagtgtgctgatgtttcttagttagaccagagtaagaagtttatggtcagttgatgaatttttaattataactgtttaaaaagaagacgatgactatgaacagcagctcactcgtagcaatctttggacagtacttcgaagtgacccactttcccatttaactcttgggaagcctgggttgccctgttttcgactttggaggtccgtgggctagattcagagtgccctggcaggctggcttgggtttgaggctgtggctgcagcctccgcaacaccctatctcagcacctgggaactggcccttggtacccgattctttcttctttgtgtgtgtgtgtaaatcattttcattttttctaatgatcaaagtatacattaaaataaatgaaagcaatacaagtccatgtgtatggtagaaaatctggacaatactaaaaatgtacagaaatggcttttaaagattaattttcaacctataaactaagctacttttcattttagtgtctttttaaaaacagcttttaaaaacattttaaagggctcatcatgttcaagaatgagggaatgtttggctacaaggccttcagtatgactctatcctatagctggaggtttaataatcaattatattaaagcttttctaagcctccagaagggtttgtctgggtcttatttactataacaggcaagttaaagaaacttgagtttaatttatatttcagttcactttttttagacaacaagtgcaatttgggctttatttatggaaggagagagttgtccttctccccggaaaaaaaaaagaaaaaaaacaactaaaattcccatatgacgctattaaatgcctgccattgggttttatgtttccaggatattgtccacataaatatatgcaatgttaaaagaatgtggatgcctagtagcgtgtacgttttagccttctgaaccaagggtttatgaaactggttgaagagtgttttattgaaacaagacaaatatttatgaacaatttagaatcatctgttttgaaatgtaaagtgcgttcctagtggtgcacagagttccaggtgtttcctgtctgaatttggaacggttcgctgctgtgatgggcttacaaagttgtgctctcctagcttttaatcagaactgaagaatcacgcagcttccctgctaatgccagagcaactgaaagcactcacaggaacacacttgattaaatgagtagaaagccttcttgagacacctaggtgtgtgtatgctgagctgttacatttgtcatggaattaacaacaataacaaacttgcttaccaaaggagcgcgttaacttctgcaagtgtataagtgtataggctctgctgcttaaacacattcgtaccaatcagaagtttactttctggtctctctggcttctgtgttgtcaccatccctggtttctgtgaaatggaaatattgtgtattcgcccagacggttggaagccgttcatgtaaatatgggccgttgtgatttaactgtcagcctgaaaggccctacttccaagggctccttttaaaccaagcacaatgaggtgtctgttttagatgcggccgccagtccttggttgcaaatacatggatttgttagccgtttgccagcagaactgctttttacaacatgccccgctttgtctgctggcgtggtggacggtactttagggcagtgagaaatgctgccattatctgcctccatccccagatctgttcccctcattggctccgggttgggattgtagggggaggcgtgcagcaaatcatcttctctaggagcagtcagaaaataagaagggaaaagcttgccccacaaagaatgtccaaatgcacaagcaaaaccacatgtgaaatcccaccacgttcaccccctggaaacccagctctagaggatgcagacggggggcccagccgacacccagggctggagtagaggcgttttataaaggatgatcttttttctagcatggacaacaaagggctaagagagtcgtcccgcttcctgcttgggcctttctgtttttgggttggcgggagccttcttcagtagacttcactttccctgatggtgagagtgtcagagaccacgatgggttacaggcttgcttaattgttttttactgggggtaagagaggggtgaaaaatagagaaaagcatgaaagagaaatgaagtcaccatatttctgccataaaaaagtagccactggtaacattttgccgcctctgccttcagtgttttgttttctccctttgtatatgttaaaagcgatatctgaatatttttccttcatattttcatgtcagaactgtagagtatttcagtggtccccccagccacggtttctctgtccaaggtttcagctgcttgtggtcaaccatggtctgaaaatagatgagtatagtacctatcataaggtattttgagaaagagaccacatgcatatataacttttattacagtatattgttttaattggtctattttattgttaatctcttactgtgcctgatctataaattaaactttatcatatgtatttatgtatagggaaaaaatgtttgtagggttaggtaccatctgtggtttcaggcatgcatttgggccctgggcaatatatccctagaggataagggggagatgactatgcatatataattaaagctgtccttggatctacctccttgactccaagctccaaaccagcctcctccccactgcaggagtcgatctctatgaatgttatgttttctttccttctgtattttgtgcttatgtggtcttttaaatttccttctgactcaggcctcttcactggcatagagcacatgctttatttattcccctataactggatatttagactgcagcttttttgcttttccaagcaatggtgctgcgagccttcatagacctttttccttgtgcgtgtatatgtgctagtgtttcttctcgggtagagatctagaaatggagccaccagtttccaggcaagaccagacgtaaaaggttgtacataaggagcactagttttacatacccatgaactatatttattacggtcgtgcttgagttctggctgaagaattacgtgacacaaaaatggacagagttagctacaggaggcagaaagcgtgcagtagggatcctgttgaatcctcaagctaagtagtttaccaagctggttgcaaatctatttggtattttcctgattatcaaaatacttgccactgataggaaacatttgtttgagggcctctcctcctccacccccaacctccagtgtacgacagatgaatcagtcatggtagaagaaacaaatggctttctgttgttactgcttctttaaagataatccgttgttttcaaaacatttgcaacgattgctttcaaggaaagggtggctggaggcctcagcccctgatttccccaggtggaaacatttgcagtgggttttcagggaagtcacagagaagagccgcccgcccgtgccaggattcaaggcaggaagttgtctgtttggtatttactcaggcgtctttgggcaagaattgattattcaatcagagttgaaagttactgctaggagttgcttaggcagtaagagaagaggctgttttccttggaaaggcctaaaagcctgaatctccaatttaaaattaaattttgctgtgactttcctgcaggatctcaggtgagagatacttcttgccctccaagactgaaagcctagtttgtcagtacgttagttgagtactgagggaacgcccctttgagccatagcactgggagatccagaagggacatgagccaccatctctttcaatgaccttgtttttatagaagaggaaactgagccaggggagatgaaatgatcagcctagtgcccacatgttggagaaattacaggacaaacagacagaggtccaatttctgcacctaaagggctgagaccgcatgggtctgcgtcctcctgggtccgccctttcctgtgcctgttgcatggtagatgcttagtgagcgtgttgccctgagaccatcccatctccagatggctggtttccaatgtgattatgagggcaaagtcacttcctcacggggggcttggaaagtaaaaaaggaaaagtcaaaacacataagaaatggaaataacagagtaagcctgtgtgttttaaaaactactatttatatcttgcctccttccacaaaggatttaaggcagcttaggagagttaaacaccaacaccagagccctcactacacagtaagtaactaattgccacgtgaggcttacagataaatgctgagagcctgggtgggggaaattgtctttgctgctgcagagacgttttaggcctgtctggataaaccataggcataatatataaatagaacctcaaagggacactaggggctctgttgccagaggtttatttttcttttttggtttttgtatgagagggccttggttatggctagggaagtggacaggggagagaaaaaatatttattttccaatgtatcaattttgtgtgccataccctgccttttcacatatctctttcagaaagttctccacgtttacatttctggagaagttaaaatgaaagaccctgtttacatttatagttaaaattaaaaacaggatttacctgggagctaataccctccagtgacttaaggttggaaattaaggcttcctggcttatctttcttaaggatagaaaactgttcactcctaaatcgccccctagtggtcccttaagtcactgatagtctcctgcccgaggagctgcacggcaggtcccagttggaggcaccatcatctgttgcattgctccaaggtgaaattggccatcacgatgacagaattctgcaaggagaaacttcggttgacttttcttctttcactcccagggttttcctttatgtcttcactgctgtttccagatttctgaagaacagtgcaggactgagtttatgcacgaagctctgaggaccaaaggtggagggaggtcttccttgaaaattactttgctgaggccttgctccttgttcaaggcaacactatgggaggggttgtatggtggtggctgctgctcagcaagggtgtccagcatgtgccggggaagagaggttttttgaagtacatttctagtcgatagccaagcctattgtgaagagtgggaacagggctggtaatagctgcatctcttttttttttgagaccgtctcagtcacccaggctggagtgcaatggcacaatctcggctcattgcaaccttcacctcctgagttcaagccattctcatgtgcctcagcctcccaagtagctgggtttacaggcacgtgccaccatgcctggctaatttttgtatttttagtagaaacggggttttaccatgttggccaggctggtctggaactcctggcctcaaatgatcgcccacctcgtcctcccaaagtgctgggattacaggcgtgagccactgcgcccggccagctgcatctcagaatttttgttagcgagtctgacttacaattgccaatacctgagagttcctttagtatgcagttttagatctccactaaggcttcatttaaatacatcttttctttgccaagtgttcagctgccagtagtgatttctcatatggctgattctaattagacctgacattgtcaaactccataacttctccaagttacagaagtgatacagtttcatttctaaaagcactggaaagctcagagtgagaagtaacctgtcatctcacaatacagaaaaatacctatgccttacgtgtgcttcatgagggggtggtagaaaatgagaatgaaatggccgggcacggtggctcacgcctgtaatcccagcactttgggaggccaaggcgggcggatcacctgaggtcaggagttgagaccagcctggccaacatggtgaaaccccatctctactaaaaatacaaaaattatccaggcatatggtggcaggtgcctgtaatcccagctactcgggaggctgagggaggagaatcacttgaactcgggaagcagaggttgctgtgaactgagatctcaccattgcactccagcttgggggacaagagcgagacttcgtctcaaaaaaaaaaatgagaatgaaatctatgcttatatgtgtgcataaatgtttttaaaaagagatcattttctgagtgtattgttgcctacttttactttgcagtgttccacaaacaatattttgtcattaggtagtttttcagcctcagggcttttaatggctatgtagtattcaacctatgcctgtgctggctgtgatgcaatttacctcacctattactatggttatttttaccattaaaaacaatgctgggttgaagttttttttgtttttttgttttttttttttttgagacatggtcacctgggctgctggagtacagtggcacagtcatagctgattgcatcctcaacctgggctcaagccatcctcctgcgtcaacctccctaagtactggggttacaggcatgagccaccgtgcctgaagataattatatgtaaatccttccattaacttatgttttccttaagaaaaatttctagaattggaatatttgtgtcatcattttagatatctctccagaaaagttgtgactattgctttcccacagatcatattcgagtaagtcttttccctgccccttccataatacagggttattttcaactttggccatgttgttgagtaaaaagtggcactagattatttgagtagctgattgttatctagttggattgaattttattttctttttcattagccaattgtatttcttctttggtgcagttgcttatgttccctgttactgggctgggctgtttatcttttttcttattgatgtagaaaagctttatttgtattaaagatgtcaaccttttcatctttgttgtacacatttattccctgaatatggtttgccttttcctgagactgggagatgccaatcattaattatatgatcagaaaactgttatcctgcccaggcccgacttcagaaacggacgttgcaagatcaacctgaccagccctggggcctgtgctctctcagccctgaggtaccacctgcaccctgttattctgcttatgttgatattcagacttgaaattgttctgaggatatcttgtgtattttatctcagtgcagagataatgagtttcacatggatggaggggatcacagtggacaccatttcctttattttttttctacctgctctctacctgcccgtacctgagttccatggtttgtggctgtgttgattcatgggagtcttaggggggatacttgtcatatttaaatgagttcacttgaccatccaaaagatggttgagtgcctcctctgtgcttattacagagggattggttggaaagtcggttgggggtctctaatccagcgcaattttattttttgcctcaaatttttaaatagagcttatttttcctcacactgactttatgtgctgtttttttttaaaaaaacaagaggacatatcaaatcacctataaactgatgcagtttgaatatgtgtgctcttctgatacccagtaagtttctgatgatgaaaataaatgacctttaataaacaagttacttagtaatatgtatattaaacaaatagtaattcgtattgtaaggttccaagcttcgaaggcttgacaaattcaatagaatatcatccacaaggtagacaatttgaaaaatcctgattttctgataggtctactggtttgttaaataaaatgttttttttaatttgaataaccaattgatgttttgcaatttttgtttgggagaggtatttttgcattattatttctacccagtgtatttgtagtctgattctgctaaaacaataacaaaaatcttgatggagtaaagatagttgggtgaattaaattctatgacttttaattctgtgccttgaatcctgaagcaaagtctatctttaaggactggggttttctcaaagggctcaatcagagggtaatttcatatcagaagtgctcccaaatgattattcgtgggtaaccagttacataaaatgtcatcgtgtataaaagtatagtttagttcttaattaaaaagcaaaatctttgccttcagcttcgtaatctcatactctcaaattccaagccacctcccatgggtgtcacactatcttagactaggaacgggatttggctataaataaaaaactagatagaatatcatttccaaagagccaagggcacttgctggagttgctacagagactatccttttcctatcacaagcacattcatatgaaaacattgttgttttgctttttccatacttacttggagagaatttcccaggaagcctttttgtgtatttccccacaggtcaatcaattatgttgttaattaatataatgaaaaattagatcatatacatgcacttaaatgatactaacgcagttatctttatatatacaagctagtgacttatgtgggtataagacctccttaataaaaagtggtatactttggagatgggaaagtggcttgtggttgcagggaggtgttaagtcacagcattatttcacttcttgaaaatgaagccctcagaaaatggagtcattacaaaatatgtcagatctgtaatcaccaaccaaatgatttgtcagaagcagcccaggttaataatggctgtccaagaaagagtgttcagatgcatgtcagggccgaattgagtccactggtgtggctgagatgaggagtccagaaaaataacattctctgtttggaaccaggaaggttgtcatggagatgaaaatcttcctggtcccataaaaaccctgcttgtcatctgacttgagccccgtatttgcacaggtggttctcctgagaagggctgagtaaaaacaaatctattcttcctgaatggcgcctttatgtgtccaagagaatatgtttcctttcttcagtccctcaattaatgacccattatcagctaattaaatcatgtaaattttatgtgagttcatttgttacaccacatgctaactaagtctattcctgtgtgtttaaccatataactgttttaattgtgagaatgaggtacatcaggtgggcatctggagagaataataaagtactcaagaaaagcagacacacatacacagcagtgtaatattaatttctgtttataaagaaggcagaaatatgaataagtgaatgtctagcacatgccctgtgacttcgggatactgtgttcaactctattctctacagaaaaggagtcacatggctgggtttctgtttcgctgagttacgtttcagatgcagaagtcgactgcatgatacaaaaacacatctgtttaggctctccccctccccactcttgctttctttcctatgtgtcagagagcagaacttgatctttgtatacattttgtataaaagccttaattctaggtttaatttcagtttgtgatacctttctgccccaaaaaagttcaaagcttttaccaagtttctcaaggcacgttcatggttgcactgagagagttgagttcagacacaataaatgctgtgttacatttttggaaacgtacttgtattgtcatttaagaccttgcaaagtacatagggaaaagcattagatgatgtcctctatagtcaaaaactaccaaacaaagcaaaagaagaattttttattgttcattggataaggccaagtagacagcaatgggaataatactttcattaaagctttacggataaagaaatgatttaaagtgaagaaatcatactttttttgaagcctggtatttaaagaatgaaatcatacttccttgaggtttaaaaatattcatgtgtaatgctagactttggttatgcattcccagatgtttaacgcactcatcatttgtaaatggaacttacgtcagatttatgacctcagaatcttcaagtaaataaaggaccacttatacatttgcttgtaaaggtagcacctaatagagaaaatttgagggaaccattaaaacaagtataggtttagcttataaaggaaacactagtatctaaaactagtttaatttcttttaaatggactgggttaccaaagtacttcatgacattttatgttagtaaaatgttaaaatttttaagttaaaatcaagaaagcattgagataaaattgttttattcaaaacaacaaaactactatccatgatagtataatattctctgaccaacagtattcatatacacagccccagaagtgcaaaaccacaactgtgttttcacacctgtctcttgcaaattcttacttaacagatcaaaatgaccatcttgtagaaagtattttgtgtaagacactgtcacctgtgagccagcaggtggtgctctggtaccacgtcttgatcattcgtttcaactgagagaggagggctgcagtctcaatgataccaggctctaggattttctgtaagatgccacacagctgatctttagaaatacctggcctctgggggatttgctttccatctgaccatttaacatccttgaccgagctgccttctctatagctgtactgttgaaatttgtcatttcttacagctgcctggtttcatgagctgccagtctcagaacatagcataccataaaataggaattctgaccacgcagccttatgggtaaggcaagggagggagttgaagggaaaccgctatagtaaaagaaaactcagaaagataaatgttaaatagaatcaatggatattggagaagataattttagttgttggtggccttaacttatggagaactcagtatcttttctcagctccacctaacagttcccatcttttaggaaagcaattatttagatgccagagaacaccattatggaaatggaatctttttaaaataaaaacctatcattttgactgcaaccaagttatagttttgactgaatgcataattattaccccaaacaaaaggttttatacctgattccatgccatgattcttcattgtgaccctttacttgattctccatcatgagcaaccaaatcaagatgcacatgtgtaagtagtgccttatttttttctcacttagcccactgttgtttctctttgcttaatagcacagctctaagaaaacggttgcatttggtctacaagctagcagcaattcaaggagcttcattttctaatgacttgttttattttattttatttcatttcatttatttattttgatactgaatctggttctgtcacccaggctggagtgcagtgatgcgatctcagctcactgcatctccgcctcccaggttcaagcgattctcctgcctcagcctcctgagtagctgggattacaggtgtgtaccaacatacccggctaattttttgtatttttagcagagatggggtttcaccatgttggccaggctgttcttgaactcctgacctcaagtgatctgcccgcctcagcctctgaaagtgctgggattacaggtatgagccaccacacctggccttctaatgacttgttttagaatgtggatgtcaatgtcacccaccttattctcaccaaatatggagctagagagccaagtttaacgaggttttcctttgacaccctgagagcctcgcgttgcatccacttctttccaacattattatttatgctttttacatagtaggcacacagcaggtatttgttgaatgagccattgctagattagaagtgggaaagactgacagtcgaatcgttaggagtcgtctgcagtcgtcaaggtgagtgatgacagtggcctgtatagggaaagggggaagctggagatgggatggatgtgccctgttggagagacagattccacagaatctatgagcaaactccaggaacatgttaaaagtagatgagatcctgaatggagggcatcacctccaaagcccgtgtcccagttgacagtggaaaggactcagagagatgcctctagctcaggtgaggagtggatgtgattttaagccaaggtggaaaacaagtggggaaactggttctgctgttaagagcccaacagctgtggctatgtgtttggattttgcgactcgaatcaggttcattaattatggccaaatgttagcaagagtttataatgataagctgtgcaaagagtttcaaaaattacaagtatttctgaattgcttacacggacattggtagggaaagagaagagaagatggaaaacaaggaatatacgacaccatgcttgcccttgagaattttagagtctgtcatgggagaccagacttgcacgtaggaggcaaaacaccaagtaagaaaaaaaaagaaatgatatagctcaacatgagcagaagagttggtggatagattcacataggcagcagtggatcagttaggctgtgtgaagaaatgaaagccttaagattgaaggctttggagagaaaaagaggtttctttagaaggcattggtgtggtggacagaggtagaaatgacctggaataaatttttaggtggtttaaaggggtgacccagcttgggaggaggcgagaactggcaggtgggctaggctaggttagtaagatgccaacataaaaagatgaggagctttacccttaatccactctagaacaagaaggcattgttgggaggaaaagagcatgttaaggctgtgttttaagaggattattctggcaacaacacttatatagagtggagccatggtgattagcattcagcagtcctggcaactcagctcagaaatattcagggcccaaagtgaaatgtggcagagctcatgtggaaatggggttggagaggggagtatcagaaagcattttaaaaggccaagttcaatcttagtgacagattaaaaaaataataataaataataaggacagccaggcacagtggctcatgcctataatcccagcactttaggaggctgaggttggagaattgcttgagcccaggagttccataccagcctgggcaatatagtgagacccagtctgtacaaaaaatttaaaaattagccagctgtggtggcatatgcctgtagtcccagctacttgggaggcggaggatcacttgaacccatgagatcaaggctgcggttagccatgatcacgccattgcattctatccagggtgacatagtgtgaccctgtctagaaggtgggggaaaaaaagcaagggctttctttgtaacccccattcctgtggtgatggggttttccaaataatgaaagaaatcctcaacactaaatagcaataacaaccacaacaataatattagctaatatccaccaggctttctgtgtggccagctgtggtctaggctctgtatgttgactcatttcatcatcacaataatgtagaggtaggtactttcattatcatcatttactataggcaaggaagttatgtcatggagagattatgtaacttgccaagaaaatacgactaggaggtgggaaacccaggtatgagccagggaagcttccccagatccccttactgctttttgtaatctaacagaagacccaaccaccaccaccacctcaggctttgggcattttagaggatgtcatttagatgccacaatattaaaatttcatcgatttcttatctagcgattgactagaatagtttcagaattaggatcattccagaaaatccagaacttgtggttgttaatatctagagcatccaccctggagccttacacgaatagtagcagatgcctcagatatgttttaggtggtgagttggtgtaaggactcgagacagagatgactgtgagtcaggtctgagagcctgggaggggagcggctcatggctcagcctacatgtgtgaaaaccacagcgtgtggccatgtgagttaccagcgtcacctggggccagcctgggcctcgtaggtttataatttggtcatggatgctccctaatcacactatacggattacaaatgaaaactccatgagatcaggactcgccggtcttcactgatgtttgtaaccagtgcccagagcaatgcctggcacctggcatttgctgaaggggacaaggaaagaggcatgctgttggcaggtggtaagggatccaggacactcagcagagtgattacggagcataagaaccagccgtgtggttgtttatccctttcgtgcggtgtcaccggccactgggaatctcctggttaaacctcgtctctcaggcaggaacagagcctggtttctgcctatgctgggaccctgctaccccagcttgtatctcagaagacaagcagcaagcctgaccagcgacccgcacagccagcatctgggtctatgctgtgtgtattgtaaaaagttaacatacgggccaggcacgatgactcacacctgtaatcccaggactttgggaggctgaggcaggtggatcacgaagtcaggagttcgagaaccagcctaaccaacatgtgaaaccccgtctctactaaatatacaaaaattagccaggcgcggtggcgtgtgcctgtaatctcagctactcaggaggctggggcaggagaatcgcttgaacccaggaggcgtaggttgcagtgagccgagattgtgtcattgcactccagcctgggcaacagagctagactccatctcaaaaaaaaaaaaaagttatgaatcactgtgggcttggagcatctccccctttctcctgctagcacaaaaaggtagcgttaggttatagggaatagcaattaattcattgtttttgatgttgcagttagggaaaaagtactcgaccatttttcaaatgcctaggtggtgttgtttaactctggtgaaagcagtgcttagagtcctgtgttctcttttgatactggagccagcggtagtttggtacatactaccaactgtcccccaacactaaccactgaatgtctacttatcccagctgggaaggccaggagcttttcaggttagtcgggatacacataaagtcactgtggatggacttgatagatagaaactcaagtcaggaggatggagaaaatgggatgggtctgggaagtattttcaagtggagtgacagggattgatgacttactatgtctggaaagtgagggagggagaaagatgatttttgtatctctacatgacagaggcagataaccaggatttgtggccttaccttctctggcggaacttcagatataacagatctctgcctagaggagaggaaggagttagaaccagcaagctcaactgttgttacctcagcatcttcccagaccctaccaccctttcaggtctctcttcaattatcagcatactatacctaaagtgcttctcccttgggcagtggtggggggttcttgtgggtgtgggcccagaggttcgagtcgtgcccctgttacgtccccatcactgcgctgagctgttggcgggggcggggacggggggcgctgtgccggccctaaatgagttttctttcctcccttatatccctagatatatatggagacaaatctgttgctgtgtgctgtccctgttgtaaaaccatttgaggtatatttgaaacaagattaacacgttgataactgtttaagctgggtgatgggtacgtagagtttcaggacgctgtcctctacttttatatacgtttggaattttccagaataaaaaaaattttacaatggcaataatcacctttaattcttgagcctttctgtactttgagttttcttaaatcaggatgcacctctaatatcagcagtgataatgaatcatttgctttataatagtagctgatattccagctcttttgattagtaaaaaagttaaaaaaatttttttaaagtagctgaattcacaaaaatctgatcatttggcttaaagatgagttttcatggctttcttcattattgataaatacaccaagaaaagcaggaccaaaatcccacagaagctgtttccacatttacctaagtctccctgtaaaatgcatgtgtgttactgctctccaaatgtacatttttttttctgttctgagtgtaaaaagcagacagaacagggaagcaaatgttcctgaatggccacatttaaattaatcatatgctgtcttaaagaaagcaaaataaacaagctccaaaccgaaatactctgtagtatttacccaattatttttaagcatagaaaataaggcccaaagtgtgtattagtcacattttaacatcagagtcaccatataatttagttcatttgttaaccacatcagcacacgtgcgaatctcaaaaccctgccatttgctgtgcccatacgttaatgattctgctgaagacaaggccaaatacaggacgggagaggaagaaactgtgtcctcagttagcttccttgaatataattagtaatggtcagcgagctattgattacatagtaaaacttacaattgtttgctaatttgagggatggattggccacctggtaaagctttaagtaaaatattttttaaataatgtggggttttcttgggtttgtatctttttaatttttttaccttttttattactaactataaaaggactttttgtgtgttgaaatttgaatatggatggatgttagatgaaattaaagaattgctaattgtgttatgtgatattagcattgtagttataattttgtttttttttaagtcctctttacttagaaatacgttataaattatttctgtgtgaaatgacatggtctctgggatttgcttttaaaaaaaacacccaggaaataaaaagaatggcgagttgacatatgaaacaagaatggcaaaatgttgattaatcattcaaattgtgttgggtacatgagagtttattaagttagttctctatgttcgtatatatttgaaaatttccataataaagtgttaataaggaatcaaaggaaagataaacataaaaatcagaatatttacctctccgaagaaaaagaatgaggtaattggattgtaaccctcaataggcatcaacaacttggaaaatgttcttaagttaaatgatgggtacagggtattttttattctttgtactgtatataccgtgtgtgcattattttgtatgtatcatacatttcactttaaaaataaatgaagtccatcaatatggagcagttttttttttcaagtgcatatcttgacttgagacttagtctttcaggctgtactttgatgaacagataatccttataattaacacatcaattaagaacagatatatggtgctgaaaatcttggcaggggggatggggatagggggaagggtagggaattagatcaagtaaaaaatcgatgttgagtaccagctatggtttctatcttaattaggcaaccttccttaaagatatagcagttcttgaaaagcaagaagagtgatctgatccttaaaaagtggagaaaaataaacaactttcatttacataaactttctttggcactgcatttttgctattgccaatatcataaaagtctgccttgtgttttataacactggaaacgtgagcataaatcagtcctagagaagttctagccttatgtgtgtaaagaggcttatgcctcgatgttcattgcagcattgtttgtaatagggaaaaagacaatcagaaacatcctaagtgtccatcaatagcagaataattaaataaagtatagaattaaaaataataagacaaatatatgcgcacggataagaaaggtctctaagacatgctgtccagaggaaaaaaagttacaaaataatacatgatgtttgatggcatttatgggaagatgcatatacatgaatcaatataaatctgtaagtgaaaagatctgtgagggcataccccaggtagatgtcagtggtttctccttggaagaggagatgaccaaaaggaattttagctatattaagcatgttctaatttttttttacaagcaaaatatatttgtttcttacttccataattaaaaattcttttaaaaagcaaaccacttgctgaaagaatcttgctatcgaaagaagcttttcaataaatgattttgtaaaatgattgtttttcagggtaaagtgattgttacattttgtaaagtgattgttacatgggcatattgcgtgatgctgaggtttggggtatgcttgatcccgtcacccacatagtgagtaataccccataggcagttttccagcatttgcattcctctgtcccccctctagtagtccccagtgtctgctgttgccatgtttatgtccacgagtacccaatgtttagctcccacttacaagtgagaatatgcattatttggttttctgttcccttgtaacactatctcttcaagttacatgttttctcgattgggtgttggaaaagtaagctatatcttctatactgtggaaagttaaggaaccagaaatcatgtttttcattctctaaaaaattatgtgtgctctttagatattatcttttgatactgagactacataagtgtccttcaaataatgcagaagaaaaagatcataggcaggcaaaaattacttaataaattaagctttttaaagaagtgaaagaattatatccagaaccaacagctcttaaatattctatttcaataaaaacaatttatatacaattgcggtgaaacttatttttggcaaatactcttccgtaagttatgaacatttctcttgataaattttatactaggtatataagttcctttattggtgttttggatgacagcaaatgactttccataaggcagatgtagattttattcacacaacttttcaggagtagctttatgtaaatatgttaggactgtccttccttgagctttacagttaaccaatgaaagtgagttattttagggaatggttagatttggacatggaccaaaattagttttctaatgagtggtgttaaagatgtgtaactactattacagagataatgtaaatggccttctacttcttaattctctgattctgatcttgttttgtagtaagaaaggctcagtatgaatttgaggtacttaactaacttgttacagtggtggtcagtgaagaaagattctatcgggcaggactctctggaatgcatgtgtcagaagcccagcccaaattggcctcagcagaaaacaaaacatagcgaaaagcaaatgacaattcattggctaaagcaatggaaaaatacaaggatatctagcttgagactcagctagagccaaatattcaaatctggtcatccaacgttgattggtctctttcaatttacttagctgtgctaaacactgttggcttggttttggggcacgttcttctcaaacatggtgaaagtggcccctagcaccgccaagattgatcctgtcacagcccagcaatcccagtggttgcttaaaagcaagtccttttcttgataattctagcaaaaatcatagggaggtcacccattggcccagtttagggcatgtgccatcccttaaccaatcagcaatctgactagccaggcctgaggcacctcttcatcactaaaactagtcgtgatagaatcaacttaagtggaaccctgttgagagaaggagaggagggatggctgccctagtggaaatgagctattaccaagagtggatgagggcgggcagaaacaagaggtgcacattacagggataccagggatttgagtctgcagtctctctgattttccatgagtgcttatcttcttgggggaggtgggggcggtgtgtgaacatccacacagcctcctgctcctcctcatctactggggcgctcagtcacccaggtttggaatgcttctgaggtgatacttaatgttacagttcatggtcaccgtgctccatgtacgtgaggtcatgtgtattgtgtattgtcactgtctctcttcccagttatttttttcagtcaggtgctagggaattctccttttcttactatgtcatggctgtcctccccactccatggggctttcagaaagacaggtagaacataagagtctagagagaccttgggtgtcacccaggccattgaggctccatctgggcttgaaagagccctcacctgcagtaaaggtgcctctgaggccaaggagaaattatggcataagaagggaacaccaaggagatgggggcccggacataccctctcccacctccttcagatttcattctttataaaatttcacataagggaagagtctccaaagtgtaaggagggccaaaaaaaaaaaaaaaaaaggttgaaaagccttccatctagtctaaccctaagagtactcatttatttttgttttaatttttaaaaattgatacataataattgtacatatttatgtggtacatatgatatttcaatacatgcatacaatatgtaatgatcagattaggtaattggcatatccaccacctcaaccatttatcatttatttgcactgggaacattcaaaatcctttctcctagccattttgaaatacacagtactgttaactgtagtcaccccacaggcctatggaacagcagagccctttcttcctgtctagctgtccaaatgccagtgcttagcagcagggcctcagtaccacactgcctccttgggtgcttctctgctgaatgtgccttatcttttcacccttctctaagctcctgtgaagcggggtgttcttaaacacctctgcagccccagatcactgagaacagcaccatgcacccagacatccaatgaatacccttcacgtgtgctttggataattgttaagtcccatattttttagagcatattcaaggcaagggtcataaattcaaatgccccctagggccaagaaggcaaaggacaagagggaatgagaccagggaccgtagcgagctcacaggcacacagcccagcctatgatataagctactccagagccctagttatccccaggaggagatacaagcccacagctgcctgcacatccacatttttgcacgagaagacagaaatctgggtttttctgtgaaatattttgataattttattttggaaaccaatttagaaatttcagaggccccttgaaattggtttgggggcctgatatgctcaggaaagggattctacagttagagaatatgagaagcactagttgaaactttcttcactgctagttttcagaatctttttaagagtgttcttttcagtggtctgtgtgtttttcctttagagagggtggggtgtgaagaagcacatatcaaaggcagaggtccctaaattcatttcttgctagagccttggagtaccctgagacgtgtgaaccctgcacctctggtccaatcaagaaccttctggcttcatggtcgctcatgcctgtaatcccaatgctttggaaggctgaggcaggaggattgcttgaagccaggagttcaagaccaggctagacaacaaaaagggaccccccaactctataaaaaataagttaaatattagccatacacagtggtatgcacctgtagtctcagctactctgtaggaggtgggaggattgcttgagtccaggaattcaaggctgcagtgagctatgattgtgtcactgcactccagcctgggcaacaaagcaagaccctgaagaccctgcttcttaaaaaaaaaaaaggaaccttccacacaaggtttttcttttgctcttcctgttgactggaagtctgtctacttgaattaacaagggctcttcttcccatgacctcatactcctctcagtttaaaatctgcatttgagcaatggatgcaaaacctaactggcaatataaatttgcatcttcttgaaatgggctccaagaagcaggtttgtggccagtagagccagctcagaacccaggagtggtacaaaaagcattcagatatcaagattcccctcctggctgcatcttccatgggggaggccatgaaaggggcccctggtgaaccattgagtcatttataggctaatcttagtacactccctgaagtagggaatgacatgggctgcaagaattcttcctaagcaccccagagagaacttcaccgatttaaaatatgagtttctgtaacctgagcaggagcttgcgtggtacaagggcttatgcagcctgcctgccaggaggccagagggtcgcacttatgagcttgagcaaatggggcttttgggaatcagcagcctccctgagctttcctggagcgagctgaactgaccctgaacttggagggcttgcctggcaggcttttgctgtctcctgatattgcagtttcaacatgagaggggcaggaaatagaagccccgtgcgttgaaggactgctgtgcctgcacttatctctggccagggagtccttggacactgttttctttggcagccagctggtctaggtcacttgaattcctttgaagttcagggatacagggagcggtagccactgcctgcattccttactcaggaggcaggcatggggtctgccattgcttacctgccagagaaccaggccttcattagaaaggtcatttttatgtgactatgactgaatagttcagccttttccccttaagtgggattttgtgctgattcagcagtaaagaataagcccataccccccatttttgttgccattgctcacatttgaatttataggtggagaatgggtgaagaaaaaaaacctttgatctttggtacaaatacagctgtggggctgttgcccacatttgccgtgatgtagatgcccatcccaaaaggagcaagatctgctcttgcagtgggtgttgagaggggctgggaggctttttcagtcaaatatggagctgaaaactgtcagaatgtgctggttgtacattatcaataagaatcctaacaggagcacagtgtgatttctcttcgtagtgggcgtacatggtcttgggtttccatgtgcagcagtgagagttggtctccaaagcagaacggtcagcattaacttcagccaagcaagcattctgtatggggtgctccctttaagcccaagggaaagcaggctctgctgcttttgccacctttcagagggagaggtgtgccccaccaggggtgcaggtgtgctggggcgtgaagataaaattagttgtttggaaaaaaataatgtctttaagtttctgcagagcagatcgtaccaattaaaatcagttcatcagaggattttttagtcaatccatacattcacacataaagagatgtgattataagtaacttggctgattccacaagctactcacaaaatcagatcattattttgtaatcacatttgtgggtttagatgcctgagagaccttctgaaccatcaccgttttgggtgcctgtgagaatatttgaaactaccggccgggcgtggtggctcacgcctggaatcccagcactttgggaggctgaggcaggcagattactggaggtcaggagttggagaccagcctggccaactgatgaaacaccatctctactaaaaatacaaaaattagcccagcatggtggtgggcacctgtaattccagctactggggaggctgaagcaggagaatcgcttgaaccgaagaggcggaggttgcagtgagccgaaatcatgccactgcactccagcttgggtaaaagaatgagactccatctcaaaaaaaaaaaaaaagaaaagaaactgcccatatgcatggctaggacagccttgatgttgtatttagtcttatgcagggcaactcctctgaagtcctcctctcacttctcactatcttacactatttgtgatagacaatggagaaagagggttttcttcagcagagttggagtatctactctgtactggatgctaaggatacagtgctaaacaggatcagccacataatttgcagggaccagtgcaaaatgaaaatatggggatccgttgtttgaaaaagcaggaaaaggtaccattaaagatatgaaaatataaagcttttccttttctttcatgatctttctgtctccctgtcctgctatttgctatttaatgccatgcattttcaggcaaggaaatatagcacaagtggaagaagctgcaccctgcccactagctgctgggtacctctcctgctagtcacctgctcagtgcactgtgccttggctggggctggggaaatcaagccaggtatctcccccatcccaagggcctgcagccctaatccacacccaatgcatgatgcccaaagatatggcaaccaatgtgccaggatgcgttaggcctatcgaacacactgtggcactgtcatgcccacccactacaggcacacacacctgactccaaccctcgcctctcccaggccccaccaaggatggaaatcagcagcagagatggggaggagggggccaggaggggccaagcctccaggtccccagtgcatgctccatgatcccatcaaatttcacttacaaaacacaaattttaagataaaattatttagaattttaagacaaccactagagcattaagccccaagcacagggttctcctaagtgcacgaagccagccctgttggtaatagaaagataggaagatgcctccccttacctatgaatataatttcttctaagggctaagtaagacataaacaaagaggtcaggacaaagaaaggccgagaaggtgagagacttgtagagatggtaggcaggtggcttcttggatgacaagtcattgaagccaagtcccaagctatgagaaggtagcatccaagggaagagctgggaagattgttccaggcagcagggacagcctgtgcagagaccctgtggtaggaaagaacctggctcattggaaaaactgaaagaaggttttgtgactggggcctggggactagggaggagagtaccatgggagatagtaggaaaggttgataggggcaggcagatatttggagacagggtaagttttatcatcatagcctttaatttccccaagtggtagctgtatctttctactcctccccatcttgggttaatttcttcctaaaaggcagaggctttaatcccaaggaaacctttaatagaaaaatttacattttagttcatttgtttccttaaaacggggtttcatctggtagctatcagacctgtgctggcacctgttgtggcagttaatttaaaactcagaacactttgtgcctttcatttgcccccttgaaatataaaagcctagtgccaccgttgcaaccttattgaaaagagcttatctaaaattggggaatatcagcccacagtaggcatataatgtgtttttctcctacacactgctgtgagataagaaaatggtttctagggttctcattaggtgatgtttctgggagtctttgccctgttgtgaaatggccttaaaggtgaatgctttaagtaatgagcagccaaaggccccgcttctggcaaagagcaagaaattgctggaaaggtcagatgggtttcaaaaatgttctgcatttgcctcaaatagtgacacaggaattattcagcttacataagagctgtttataggtgcttggagaaaatcaaggttgtgattgttttggctatttaatggggcatatctgtcccaaatttatgggggaaaaaaaagaaagtaagttttagccagagaagaaagcttagggtcacaggagaacagagcttcgaaacggcctggacagtcccagcagtcattagctgggatcaagcaattgtgacatcttcatcttgtgtattgtaatgaactgattagtccacccctcggaaaacatagaaaagcaaagacagccttctcctgggaggtgtaaagagtgaacgtttaaaatgactgtctaggttcctctgctccgttttattatttaagtacttatattggtggcttttccccccagaggtaaaaaatcatttgcttcctttttaaagaagaacgtgaccctctaataataaggcacagaattaaatgccacttaaatttattatagttaaaaaaaatttttctagaaagtggcttgaattttagaacctgacactatcatgtaggaaatacctataaatttagagatattgaagttattgaaaaaaaatccagcaagttgacatttagatgcccctattaaaagtcaattaatattgtggattttttattatattgctataaaaatccatttgattctcatgtagatgagaagttttgaatatttagatgtcttaactaatttattgggggaaagaggagacaaggtgtaaaatacagtgggcaccaactttggagcaaaaagacattttaactagacaaagatttagcttataataggccataagtttaaggctgtttcttaggttgatttatttatatctctccagtcctttccaaataatcagttttcctgatatgaaataaaatatctgacctttgatatgtccgatgataacgtttagttgttatctatgccaatcagttaccgccagctttgcaaataatcacaaaacaaaatatcttccagctctgcctcccaacttaaccaatgctacattgaggaaactttcatagacctgacaaattgcatgtatgactttttccttcttttaaaattatggtaaaatatacttattattttactattttaaccatttttaaatgtacaattcagcggcatacattacattcacgttgtcttacgtccatcacttctatttcttaaccttttcattaccctacacagaaattctgtaaccattgaacaaatgcatggctttttgtttattttttggctggtttaatggggctgttttcaggcttttaagaatcataatgcttggtggattgatttttttttccttccacctcatgctcttctccattctatgagtgccctgccagctccaaagccatgggaatccccagctgtacacttgtgcctggattggaatcccacccctcctatccatgggctcttacacaggccatagaacttggagttattgcccatcagagtcaaattcaagctgttgacctaaaagcgagccattcccagccactggcatctcccagcccccactgtctgctaatgtgcttattatttttctgtttccttcactatgcagtctcttcttgcagcgtgctctttcccagcttcctgtcagctttatccacttaccttcctctgatgaagataaaggttttttgcacaaaatctgctcagccgcattccatgctgtgtgctggcaagggcattgctaatagctttaaaattcacttaaagaaattggaaacagcaagtcacgtgcaatcattgtcaggcatgttgttaattacttgatagagatgctatatggactgccttttggttgtaattagaggtttttatcatctttgccttgcctgtaagcttttccaaatttctttatgaacattacaagtggagatggataggctaacacatatcagattacctgccagtttccctgaaattgtcttatttaattgtcactctttgcatgccacttgcatttctttgggtgcttggattagaaaaatgatttttcatcgtcttatagtttaaaattagcatttcctgccaccagtaagtttggacttgaccaagatctcattcagaaagttgttggaagattaaaatactctcacctatgctaaaataagagcttaattctttgcaatgctttgtagtatttgactttgaagctgccagaagttttagtagccaagtagtagtaggaaaactacttcaaccacgaagaatctgaattaggagcaagctctaaaccactgaaaaatatttcaaaatttgtttgaatctgtaagggtcttcttttgtaaagaagtaaaaagagtttgaggaaagtatttcttattccacgatgatgctattaaaatattaatattataaatattaatattataaaataatataaattattttgatattaccaattataagttaattggtaattttcctgagtgctgaatctgtatgtcagatttttttctggggctatgtgtgtctatcatgtaatattaggttggtgaaaaagtaattgccactcagtggcaaaaccgcaattatttttgcaccgacctaatatttcatgctcagaacagtcttgagacaggtatcttcattcttcttgttttacaagtcagagaactgagactaataaaaagcttgtttttgtcgcttacttggggcaaaggaagaaaggttagaatagatgaatgctccttctggtttcattttaaagttaaatttactctattttaatctcatctcacttcctctaggagaaggttggctcgccctggtttcgggtgcctcccagtctgctcaaaaagaaagcccaggcctcctttataccagcttctaggactttcatatgcaaacgcatctgctgggaatcttgctaagaggcaagttctgattcatttcctctgcagaggagcctgagattctgaatttctaagaagctcatgggtgttgctggtgctgctggtctgtagaccacactaggagcagcgagtatatttctgtatttcactccttcccaaagccatacctagtcctcttcaaggtactgctacatttctctcttatcctttaatactagtcagcttggaagaacaatctgctgcagctttcttttctttccttactatctgtgctatagtttatcttcttcccccagctctccatgaagctcttctgtcagaggatttgtagggcctttctgccatcacatccaacacatactgtcagttctcacctttccctctgttctctggggcatcgaactaaccacccccctccattggaaaatgatcctctgacctcaccactctggtgcatacactgggtaatctcatgactttggcaactcccaaatcacccatgcgtctgctccagaaccctgatctgggacatctctgctcaaatgtcaatatacctcaaacctaaggtatatgaatccaaactcttgcactttctctttctccttctcctcctctttgcctttccagtctttcttaacataggacaccttagagatgctttagactctgcttctcacacacccgctgtcaattccttccagttctaactttaaattatttctcatatcatcccctccttatccaccccaggcccccgcatcatgtttgccaggattgttatacctccttccatagattctacgtccctccacttttttcttccttcctgcagtcctttcttttataatacgttcaagcattaaaatttttctaaaaccttgatttgatatatattttcctaatgggtaaagttctgacggcttcccagtaaagaatatggttctagtcactttgcctggcctccaaggcccttcacagcctttttcacacacaccacttcccactgtagccggctctgcccaacccaaacgtcagccagactgcctcccaaatacatctgggaatgttctgctgccacgcctttgcattcactgtctcctccttctgggctacccttcctggtatggtcaattaaacccacctcacctgttcactgattgggttgtagttgtcatttctagatttcatattatctacctcactttgtagcatatgcaattaatttatgtcacttccatatatgccacttaaaaaataagtatatatttgcttaactatgtggcagccactttccccagaaaagagagaatggcaggaaacctgaaagagcatcatgatagcatctggaaaatgcaaaaatacatttcttcttttctgtaaacacttcagcatttgtgaacccagggcacatttcctccctgggacagccaacagcactgtgaagatatggttgacaagagtatccagcttacattaaaaatgcatctaactaaaagggtttaagtcaactgctctttcttgcatcttcattatgttgactttacaaatggggaaaaagcaagttcaagaaggaacgtctctgtggcttcctataaattgcttcaaaatgaagcctcttcccttcatccttgtagatttttcttggtgacattctcctttctgagtgctttgagcagccactcagatgcctggtatctctgtgacaatcacagtaatcttttctttgttaattgacctcctctgaagtacggagaaagttttatcttctaccctggattataaagcaaaggcaaggcatgcgtgtttgttctcttctgttctctaaggcactagagtttaatttacggtaaaataagtaccatcaaaagcaatttcctaagccccttggtgtccaaggaaaaatctgcatatgtaatgatgaaagctagagagcagtgccttctttggattgacccaaagcaagtagcatagcttctgaatctgcactgaataaacaacaggttgtggcctgtcctcagaaacagtgtaagttaaagatcccataaattctgtgtcactatgtaatggtgtcttatagcaacctggggtcctttacttttgttgctggggggctgtccagaccagccctgaggatatccaagggcactacccaactccttaaagtgtgtttaggtatttaattgagcttgcctaggggatttctgagacagaggagaattgccacctttggggtacatgatgttttaaaaaatggagttgaagactgtcagagatttaaaaacaaatacaataataacaacaaaagcctcagatgagccaggtagtaaatgtgtgatttggccattctgagacgcctagatgaatgacagtcactataaacgcgtaggagaggttgtgtctatctaaagttgtccactattttttttagaagagaatgaagagttgagactctccagtggatttatctccttttctttgtggctttgctttaaggatgggcccagggtttatatcataatgtgttttctcttagaaacagggaaacaatctaatgaactaaacctgtggtggtatgcatataattgttcttgaaatgaattataaatacagtacaattaaatagacacagttctgtgaaaaacaaacttgataagggagcagctagctcttccctgcttctatctcatacctgcgtcagacataactaatcatcacattcttatcctcagagtccacccatggctccagagtgctctcagtgttatcactccaggcagccactgtcaatctatcaaagatgctcttaatgttgaaaaccatttgtttgccattttcgcataatggaaagaatgctaggctgtgatttaggacatctgtgtttagtccttaatgctaccactagctagctttgtgtgggggtgcgaagggatggtttctgttttttggaagggaaggaggaattctttttttgtctttttctctcttctggactgttcttttctataaaatgattgaataatcgttgaggtccattatacttttaaaattacactctttaagttttatgaacaacctatttataaatttgaacatttccatttttaagggcaagaaataagagtaagaggtttgctgctcatgaactcaatgggtatctctgtgtccagctttcagtcttataggagatagaatcctgccctcaggccaggtgtggtggcttacgcctgtaatcccagcactttgggaggctgaggtgggcagatcacctgaggtcgggagttcgagaccagcctgaccaacatggagaaaccccatctctactaaaaatacaaaattagccagccatgaaggcgcatgcctgtaatcccaactacttgggaggctgaggcagaagaatcccttgaaccttgcggtgagccgagatcacaccattgcactccagcctgggcaacaagagtgaaactccatctcaaaaagaaaaaaagaatcctgccctcacacattttattaattttaataaattgtattctcttcattcttggttatttctaagtcaagggaaaagtttagtctctgaagtgataaactcctggctgagcactgtgacccatttaccctctgctgtgcctaatgaccgcacatagtctttgtgtcagagggctcagagccatgtaggaatcattagagagcaagaagtctgtatgcatagaggtgagagcacgggtatctgcatcagtacaggctggggccacattgcaactctgccatttactaaacatgactgtgggcaatcacttactcaagccctaattccctagctgtaaatgaagaataatatgagtatgtaattcttaggatgattggcattaaatggaatagtatatataaacaagccatcagtgaccagaaaaaattatagaaacagcttgtgctcttattttgttgggagagaaaatgttatggaacatgttaagaaagtaatatgaatgcaagggtctttggccaaagtatgcgtactaggttgggagcagggcttggggaaggacactgtttctttagacagatatatcatctggtgatgctgttgtaccggatgccagagatacagaatcaattaaagacaagacttgacttttaaggaacacacagtatggtggggaaagaagtggaaatatcaaccctgcttctccatgtgcttttacagaggcaagcgtgcactctgggtgatggggtaggcaggagggccaggggagaactttctatgtcaggcttgaaaagctggctagagagtatgtccaggaaagaacagggtggagtatgcagtcagcatgattgagaagagagccagacaaagaagttagactaaaatttggaagccttcccaagccgagagacttatgtgtgcagaaaaccaaaggtctgagacttcttgcctggatcttgaacaagagccaaggaattctgcttgaatttcaacagaggcttcagaatatggagggtcaagggaggtgttaaaaccagatcacaaagggcccgccccaggtgctaacctctgagaggtttgaattctttcagtcattatagcctgttggccactgttttgacaacagtggcttcagccaggctggccttcatgccccagtggttttagaatcagggcattctctgacaggtagtcacaatggccaagggcaaactgctatgtctagtgatgggggagtattagtagagttattaatagttagaccctggcctcaggtcctaccccaaggatggtggcttgaacttcttcataattggattgcccccagtaaaatcacattacaaacaaaagagtttattggaacacctggtgcctgtatctgtattggaaattgtattccaatgtactaccctgtcccttgcagctaatctaatttcctttccttcccctcatcatctacccccgccccccgcaactcatacatgtttagttttacaaaataataccacctatagccatgtatgaatcatatttttcttttatagtgaacgtgagtccccaccacatttgtgaaaggggagttgagttcacacaaggcattgggagcacaggcctgggctggggtcaggcaggggagatgggatttttgggggttgctccatccatctggttatgttatttgaggaggctgagaccaagggaaaagggaaaggcttgggcctgttcagcaaactcttattacaaagaccattttgaagcactctgctgtgccagcacaaatcgtgattggcttctcaggctgagccatgcaccgatgaagggtttgaacaattccgacaggtgcctggcctgagctacagcgggctggtggatgactcccctcggtattcctggagagttattgaatgtggccaagcaatgaaataacagtgaaaagggaagtcactttttttttttttactttgagaaggtgtatgctggcaaaaaggagcctgtccatgccagagagacccttgtggtcatattctgctaattggtctctttacaacttgaaaacattgataaacagaaggaatttaacttttcttccttgggggctgaaagagcatggatgctcagagtggcagttttatttgaagttgctgggttattctgatatacaatgacagtatcctaaagaaatgagatctttaaaagccaggacctttttcaagcagtctaagctcaaaggagcagagaattattgaaggtagaacaggattcaggccacatttcttttaaatgctcatggaagtcagtcttgatagtgaacagatgttcattcagtgctgaattattaggttggtgcaaaagtaattgcgacttttgccattacacatagaacctaagtttctgctctgagaataaaggctaaatgctgattaatccattctgtaagacttggccaaaatgtgtttttaaccattattagcatgtagtttcttttagccccattttaatctcttgtgggttataaccccacttgggatgcagtgaagaaaaaagcaacatggttcagagaactggacctttcttttgacagtttaaaattctacaactattactgaccttttacaactattacaactaccttttcagtcagtggtccccaaccttcttggcaccagggactagtttcatggaagacagtttttccacggactgggcggggcagaagttgatggttttggaatgattcaagcctcttacatttattgtaatgctattattactacattattattattattacattattattatattattattacattgtaatatataatgaaataattatacaattcaccataatctagaatcagtgggagccttgcaactggatggtctcatctgggggtgatgggagacagtgacagatcatcaggcattagatttctataaggagtgcacaacctagatccctcttaagcagagtttgcagtagagtccatgctcctatgaaaatctaatgtcgctgctgatctgacaggagacagagcttaggtggtgatgcaagtgatggggagcagctgtaaatatagatgaagcttcactcactcacccacctctcccttcctgctgtgaggcccagttactaacaggccacagactggtaccagtcctggggttggaaaccccaagttttagatcacagttctatacagattcaggatttggccaaagtaatgcaaattcacccttctttgctttgatttcatctcaaagtgatgtcatttggctgtgtccccacccaaatctcatcttgaattgtaattcccataattcccgtgtttcttgggagggacccagtgggaggtaattgaatcatgggggcaggttttccccatgttgttgtcatgataatgaataagtctcacaagatctgatggttttatacaggacagttcccctgcacacgtcccttgcctgccaccatgtaagacatgcctttgctctttattcactttccgccatgatcgtgaggcttccccagccatgtggaactgtgagcccattaaacctcctttcctttataaattacccagtcttgggtatttcttagagcagtgtgagaatggactgatacacaaagatagtgatgatttagggattcatggcagcatctagccagttccataccctaaatgtcattgacattcaataaatccttaaataggaatttaaaaatcttgatttatgggtgattttttgctcatgagcgtttgttttcattatttttgaatgttggagaacatttttgcacattagggaatactgttggctcagcagccctcaccaagcagactttaattttaataatccaagactatggttaatccaagactgtggacaatccaggaattatctgtctcacttttagcatgcatttctgtttgttcattggagactgctttgtcagagatgacattctgagttaagaagatggatcttggaaccagagagacccggaatttatattttttgcttcctagttatgtgtcctggagcaagatacttcctcttgctgagccttggttttctcctctgcctaatgggtataataatagtctttatagctaacatttaattagtgcctactgtgtgccaggcactgttctaaatgctttgtcatttaatctataatacaaccccatgaggtgtatcaaggtataataatgatggtgcctgcataatagaatatgatccattattaagcaagatagttcatgaaaaacatttcacatgctgtctgatacattataagaactcaataaatatatggtatcaatggtagttactgtagttatctattgcgtgtaacagattggcctaatatttagtgcttaaaaaaaaccgattgtctcacacaatttctgagggtcataaacctggaagacacttagctgggtagtcccatgaggttgcagtcaagctgtctactggtactgcagtcatctgaaggctcagctgagggtcggcttccatgacggctcactcacagggctgtttgccaaggcctcaggtcttcactggctattggtaagaggcctcagtttctctcaacataggtctttccaaaagggatccttgtgatacgtcaactggcttcccccagagcaaatgatcaaagagagggtacgtgtgtacaagaacaagcaaaaaatggaagatgcggtgtcttttataacctaaccatgaaagtagcagccatcagtcctgccatcttctgttggtcacacacaacaaccttgggacagtgtgggaacatactacctgatatggtttggctctgtgtccccacccaaatctcatgttgaattgtaaaccccaatgttgaaggggggtccaggtgggagatgattggatcatgggggtggtttctcatggtttagcaccatcctcctagtgctgtctagtgatagaattctcacaagatctggttgttggaaagtgtgtagcacttttcccttcactgtctatctctcttccctgctctggccaggtgaagatgtgccagcttccccttcaccttctgccatgattgtaagtttcctgaggcctccccagccatgctcctgtatagcctgtggaactgtgggccaattaaacctcttttctttataaattatctggtctcaggtagttccttatagcaatgcaagaacgaactaagatattatccaagggcctgtgtaccaggaggcagggatcattaaggccatgttggaggctgactgccacagtggtctgtgtttctaagaatgttaaatcacattccaaaaccatgaaggtgggaagctgagcttaggaaaacttgcctgaaattaaggatttgccaccaaaagcctatcagcctaagcaatcagtctgtggtacattttgcgggtaggtgcaaccaccatgcatgtttgaagggtgtttcctgtggcttctaatttgcatatcctgagatggtatcaaacgcttgcatttgctcctttgccatttcttcactccagcttttactttaatattctggtacatattttttgatcatccagtactgtgggcatggctcatcttacagtcagttctaaaagtatatagcaacccctaggtaaaagttcatttcattaccaactggctgaaggcagtgaatttatattcaatcacccatctgagtgttttcccccgattttctggggatggattcactgcagtattcccttaaatggattttttggcctttctctcaggcctgcatttgacattttctcaagaatgtttattttttaatttacaactttgagaggtttattttatgagatgggttttatgcaacaaaacataatgggttcagagttggggggggaaccctgtgaatttgaaattgactgccatgaggaggaattattcatttcatttgtgggagaaaaatgacagctaacaggaaagtagaaaggtttcaggtctcaattcacagatgaacaaatcgcctttcataagtcagcacgcttggtgttttgtatttgccgtaaatatctgtgaggcttttggaaggatgtgattagggtatgatctctcagtggagggtttttgcagggtcttcttggttaaaggggccttttgaattaaaacggaagaaaatgaaggcccttgcctcatgaacatcagagcttggagccagactggcctgtctttattccctttcttctgtgtagagctggtggtcccttctgtttttcaaaaagaagatgcttggatactcaatgcctggacttgctcattctaataatataatggtgaaatattaacttatctaagtactggaagcttcaataaccattctgcctgactctttgagcagaaaagactgtggaaaaaccactgtgctctcattttcaccctcacaccccacaaccctccattaatttccaggcatcacccttcattagccaccccagggctgaaggactgtgttatgaggctgcagggtcatgaacctcaccatccaccccttggttcatttcacagcttgctcctttcttaataccttatggcccattttccccccttcacttcgcaaggggaacctttcccagggcctgaaatggatggggctcctgctgctcctcttttgttcagtgcctccctattctgtgatcttaaaagtgtacacccttgccacaaccatagcatttgctcagtactctcaacataaaccaagcttagatcgcaatgaaactgcggacctgcaggctgccttgcttcactgagtcaatttttaaatgaagatggaacacaagaggatgatcttattgttcagtaaatttactctaatacataaaccccatggtggaagatggtatttggtgagtttaatctgctccaccttttttaatgaataagataattataagatgtgattgtatttgctcattatacaccaccgatagcagtttgctttagaaatactgcataggtaaagtaaacttcctaagctgatcaaagcaaggagaagggcgcacctgccaagcactgggaattttcccatctgtctgtaccatgaaccatgttacctttgatctttttctttggtgattgacaggctggtgaaaaccatagcaacttctgaaagtgcctatcaacgtggcagtgggagcaaaattaatgtgtgttttcccccaaagaagatactaggtgtgtaaaggaatggtttagaagcatcagggagacagggtagcactgtggttaagaacatggaccctagagccagataagcttaggtttgagtccaggctctaccgcttagtagatgtgtgacaagtatattagttatctgttactgtgtaataaattactccaacacctagtgacttaaacagcaaccatttattatgtcacacagttgctgaatgtcagacacccaggagtggctcacccgagtggttctgtttcagggtctctcacaaagctgtgttaggatgttgactggggcagcagtcatctgaggcttgactggggccagaggatccacctcgaggttcactcccatggctcttggcaagaggcctcagttcctcaccacgtgggtctgctcctggcattttactcagagtgagtgcctaacttctctgagcctctgtttcttcatatatcatataaggaaaagagtagtacttcaaaggattatagtgaagattgaatttcaatgaaagtgcttagcatgtcatctgattcatgattaaattctcccttactcttcttaccatttttatcatcattgtgatcgtcacctaccccataattcctataatgtttaaatgggcctatgtatctccaatttctgtttttttttttcctctttgccaccaacaatcttcccattcctctgaatttcaaattctttcttgactgcctacaattagaacccatcaaaatgtcaatacccaaagacagatggagccctcctggggtctcagttggctgccaggacatggaaggatgtggctaatggtagaatttgcagagaacttgcaccaaatattggccctgtcattaaaacaaagagaaaaaaaaatatttctgcgaaagagtttttggtcagagaactataactacagtttgagatgaaacacaggaaaaaagacatagtggaaggttgtagaatatatacacagagttcacttaataagagatattaagtagagagcatctctatctgttacactccttttaggggctcttaggatctttggactgtcttcagtgataaggctcaggtgtacacatccaagtttgcctagaattttgagaggtccccagatatcgtccattcactgcacgttaattaaatctatataaacagacaaagaatgcagtaaagaccaacatggtatatcttgaatgcatatttgtattggaaagtgaatagtaatttgatattcctttgtacatgtcaaacagtcatttatacaagcacacatattaaacttttggtgtttttgacaatttacttgctaatccagctttctgaacgataccagctacccataatttgtttttctcagccatgatgtaatcattaagttgccataatgaagattgaaggtttaataatggaaagtgttacaaatttcaatttaatcattcctaaattgattagcaactttccccaaatgcctggccacagaaaaacagagagctaagagagacaaagtgctgtggtccgagtttgataaatggtgctttggtgcagctgtaattgagttattgaatttactcatcttccaaatgatgtttgcattgtctcagccatatgtgttgagggccagagaaaggtcattagaagcttcagaccgagggcatatacgggttacagcaattttgaacagcaacaccgtggttagtcaattaaaaggaacacccagcaacgtgtccctgagcctcttgccacagaatggtcagtggtgagatcccaaaggcctatttaaaagagtctgaagattctgtaagtaaatgtctactctcggcctcaggctatttagccctgacaaatgacgtgggtgagcccctatgggcagatttgaaggaaaggacacctataaacaaatccagcctggcagctctaacaaagccagaattgaaataattagataacagcactggcctcgctcaccaaagagaggagctgtgtgttgttttctgcattgctttgctaacaccagatgtgaactttttaactttcacctagatttctctccacaacagtatcttaaaaatagtaaatcagcatggcacttcagcttaagacattttgagaaaaggctttgttggtcttttccccgtagcccactaacttatccctgtctacccgcatttcaggtgagtgtgaacattaatgccgcttgtgtttcagtgattactaaatagtcttcctttttgtcctggacccatttatatagctgtcacatggtaaatttttaatctaagatgtgatattttacaaatccattagaattcttgtgaataaacattctaaacggaaggggctaaagccaggaggccattttgcctgggaactagaaaagacaagccttcaggatgtggactgagaggccaagaagcagggagaagccagtgacagacagcaagggagtcccagccctccttgagggcaaaaccagtagggaaggctgactgggcccagctgctagttggcatgggtgaggacccctcagaggacatggcccggctccaagacatgcatatggcaggcaccacttggatgacaagccacctcaaaacacttggtttgctttacagtcataaaggtaaagttctctagaagcccctagattaatttattacatagatactatatgagttttttagggctgcatttacaaagtactgtaaactaggtggctgaaaaaaagagaaatgtattgtctcaaagttctgaaggctagaaacccaaaatcagggtgttttcagggccacgttccttgtgaaacctggggggggacctttttttgcttcttcctagctgctggatggtttgccggcaagctttggcgttcctgggctggaagatgcaccactccaatgccctgtcttcacatggtgttctatatctcttcacatcgttgtccctctgtatcaaaatatcccctttttatgaagacaccagtcatgttggattagggccaacccttaatgacctcatttttacttaattgcctctgtaaagaccctatttccaaataaggtcacattctgaaggactggccgttaggactctagcatatcttttgagtcagtcgggggtggaggggcacatttcaacacattacagacatcaagttttaaaattgcaaaatggaatcaattatttccttttgttgtctaagtcaatttggaatgtgtttctcccagatattttcattgaaggttaattttctggatgttttaggggaaaagaatagcacatactaacaatggatctcaaaaatgtccgtttgggactagttggtcggaatgattggcacagtgggtctttgggtcctgcatgtagacttgagttaaccatttcaagtggcttcagctctaggtgacagatttcactccacctgtggctggcttctctgtatgtctgtgcattgtttccagaaggacttgtcaaggagcataggagtatttccctcttattcaagaacagcatccacagcacatggcgggcagtaagtggggtgggggagcattaggctttggaaagttacagccctggattcaaatcctaccaccacctcttactagctgagtgaccttgatcatgttacttctctttcctgagcttttcctcctccataaaacctagtggatgaggctcaaatgagctggtatgaacaaagtacttagcacatagcacagacttcatgaaggttagttcttcaagcagcccatcctttatatagtctcagaccacactggtataattttagttatctaacactatatagtttacacggcaatttcacttactatatttaatttgtatttattgattgagggacacgattaaaaatataaaaatgcttcttttaaattattcacaactggtagctataactatgaatcttcctatgttcaatattttaatttttttttttagccaacagccactaatcttgattagttagtaatctcagagctgatatcataccccaatgcagtggttctcacctggaggcaattttgcccccaaggaacatttaataatgtctggagacgtttttggttgtcactgctgaggaggaaggacaactagcatctagtgggtagaggccagggatgctgctagacatcctacaacgtacagcacattgaactaactacccactttcaacatagaactatctggcccaagatgtcaacagggctgaagttgagaaactctgccttaagctaccaagatattttcatgagtaaatgctcaccttcaatcagtgcatccaatcagaaaatgggtgccatgtaaatagcactttgttttaatttccatcctgcaaagaaaacattcaaatcagaagtaatattttctaatgttatgaaaaaaaaaccccatcagcttaagtcaataagcgtttgatgagtacattgccctggggtattgtgttgctgataaatgacagctgtggacaaaccgggcatttgggtcaggctttaaacgtgagttggccaaaagcttttgggctgacccctacatgaacggtgattgtaatcacagtgagtaagcacggagtgttggtgaatttcactaaaagcagagccatccccaagagcatgcataccttgccttgatggaagactccaaagtcacctgacgccaaataatgcaacctccactggtggctagagttgttcagatctcattcgtattaaagagatgaatcatgaccgggagtggtggctcacgcctgtaatcccagcacttcgggaggctgaggcggatggatcacgaggtcaggagttcaagaccggcctggccaacatggtgaaaccttgtttccactaaagatacaaaaattatctgggcatggtggtgggcacctgtaattccagctattcgggaggctgagtcagagaattgcttgaacccgggaggcggaggttgcagtgagccgagattgtgccactgcactctagcctgggtgacagagtgagacttcatctcaaaaaaaaaaaaaagatgaatctttttttcttgaaagaaataaaatagatatttggtagcatcagaatgcctagtaataataagtataatcataataataataggagccaatattacttgaacacctattaggtgtcaggcgtaaaccaaaagttgtcatgcttcttctttgattctcatagtagctcctttgagggaggtactaatgatcccatttctcaaatgcagaagctgaggctctgaggttaggtgataagcccaagtttattcagctggtaagtggcagagccagggttaaatccaggatcgctggctccagatctcccgcttaacctctggtgcacttttgcatcagtcaacacaatgagagggtttgggtgggggtgcttttaaaaattaaagaacactgcctcagttggggttatttaaagcttgttaaatacctatttcaatctgtcaccatggtaatgatgccttttgtgtataagagatcttggaaaacatggtttgacttttacagcccaggagatagggcttctgttcaaacattaagcattctcatgccatcttcatggtttttccatagacatgtacctcgtcactataatttccaaatgtgctttaattgactcaaagaaaaaaaaaaagagtaagcgactgtatttggggcatggagaggggggaaaaggtgcttaaaacaacacaaatttgtaagccctggaagccagaatcaaaatgtgtaaccaaactataatcaaggtgtgaacatggctgcattcttttctggaggctctaagggaaaatctgtttccttgacttttccagcttctagaggctgcccacatttcttggctcatggtcgcttcccatttccaaagccaacagtgtgccatctctctgatgatgcttccatagcacagcttcctctgatcctcctctctgcctccctcttcagctttttttttaattattattattatggtacaatatacataacataaaatttgccatcttaaccatatttaggtgtgcagtgcaatggtgttaaatatatttgcattgttgtgtgaccaatctccaggattttctcatcttgcaaataatgaaactctttatccaataaatgacagctcctaattccctccttcctctaaccctggcagcctccattcgacttcctgtctatgaatttgactaccccaggcacctcatataagtggaattatatagtacttgtccttttgtaactggcttatttcacttagcatgagtaactatattttccatgaaaacattctctgacttctagaaatggaaaatcagtaatgcttgtcataaatagagggaatagccataaaaatgaacagaatgaaagcagcccattattagatgctagctgagttctactgtgtgacactctgaggttcttatctcccactgagattagcaaatattagcaaggcgcaaaagatgtagcagcaccgaactgagactctttcataatctggaagatggtaagacatttgataaagccaaaccctcttgctatgggactcagtgttaactcaaggcctgcctttccttccactacttcaaaacagttcaggtgttactgggaatcgctgtgtagaacatctaggcaggaaagaagaaatgaacaggaacactgagtgagcaactaatctaattggagaaacaaatatttgtccttttgtatttgagcgtgtgtgtcattgagtatactgaaacaaaaaaattggctttgccatcctgctgcttccttcacctgggtagattccagttgattgtcaattatatgtcaccaggtggtatcaaaaggcagtttaattccccatgaaaattaggacttaacctgactctgtggctttactgcgagtacatggtgcttggaagctgctcattaatcccattctgtaatgcccttgagatcaccaacctgaaagtgaatctccatttcctgcaccatctctgcagctggggtcagatggaacatcagatagggtctgatgacagtccctagattatgactgtagacaataaactgggggtatcttagcagcagatccaggataaattcctggggacccatttttgcccctttttagaatctacccaaacgtcctacagaggaaaaatgaaatgatgcatcacttaatatgttcaagtggaaagagaacacaaatccttgctctgctttttctggaaaatttgcatacattctgcctagtgttttatgttccagaataatctttctttcattcttttgttagttaaaacagaaaccagagacctcattgggggtgtatggttttaagcaagatttatattataataaagaagccctttttggatccacatcaaaacaatttgaccctttctacaaattcattctagagtttctgcgtgttaagggagagggtgaggataaacccagaattgttgctagttcctgcatgtcttttatttcctcttaattgctgcgtggaccagccccatcctaaactgaatagactcactaaggattctctcctgggccagaatcctcactccaaatgagctagccataatcacctgtcgttattgaagcaccaattcaggtgaggtttttaccatcatttcatcaccaactcttggagacacagccaccgtgagtgtcttgcttttgttgttattaataggttttttgttaagaccacagatttgcaggccccataaaagaactccaagggcccccccttttttttttttctatcactctttgtagtcctatcctgtgataactgcatttgtttggggagataaggaactttcgttggtcattttagataggataccatatgtcaaatttgtaaaatcttgttaacactgtgttttcttcactagagagttaccctctagtaggggaaaatggaactgccaattacagcaggctcctgctgtgaataaactggtgttatattcccagacatcaggctctgcaaggagagagcccccagttgccttttcctttctagcctgatagacaaagctttagagtaaagcgtaattagcttgactgacaatcaggaaaatacaatcttcagtatctgtttttattttaaggtctacttgttttggagacatattccaaagtcattcagcaattcattcctcaatgcaaaattcagtcaattgaaaggccagaatttgcttaaaacattcaatgtgtttttcaaaagagagataaatgaatccacctagtgaccaacaaaacttatggtatatcagactataactattaaaggagaaactataaatccccgtggcagtagagataataaatttttttaggctgacccctttggggggaatttggatcttacactgcgttcttaattttattgaggcaaagatattgcagaaagaaaatcgtttctctggcactaaacacaaataatgtacaacaataatcgtgacttcctggtagccgttttctcatccgcgggctagcttcatcattgtataatggtgagatcttgttcatcaacttctgtcccttaagaggttttccttgcaaaattggaaagggatattttgtattttgttttgtttgttcattttgggttttgttttccaaatcttctctaattctgcaggctggaaacaggtagctcagtgaatgttcagatcacatcctctggcaccatctatataaggcaatttgttatagaaagaagttaattgatttaaggtaaaggaagggaaatatacagaaaaggaggagagatggagattcaaaatgcaaaaactaaaacacatagaagaaggggtatacttcatcatccattggctgtttagtacctgctgtgtaccaggcaccaggctgggctccggagataaagtgatggattttataccgactctgcctgtgagtgctttcatttagcatgggaaagagatggtgcataccctattccaacataattaagactcattttattacagataagcaacctagagacaacttagcaacagaaacttgtgatcacaggtattcagaaatttagcagagcagatggttgggaagacgttggtcaaaggttacaaattttcacttaaataagaggaataagttcaagagatctattgtacaacatgatgactacataacaatatattgtattcttgaaaagtggtaagagagtaggttttaagtattctcaccacaaaaatgaccactatgataggtaatgcatatattaattagcttgctttagccatcccacgatgtatatgtacttcaaaacatcatgtcatacatgataaatgcatacaatcttatctgtcaataaaaaatttagagcagaatctaggttccagatttttttaaaaagagacacctttttttcttttgaaatataggaaaatttaaggatgccctttatctttgttttaataatgattcaacgttgtactggggattctagccaatataataagaaaaataaacaagatacagaaactggaagggaagagacagaatagttatcatttatagatgatataattaccaacatagaaaatcttagcagagtttagagcttatgtgagagttcaacaatgacaattagagctcatatgagagttcaacaatgttatttgatataaggtcagcttacataaatcagctgtgcactttctataccaataataaccaactagaatatgacaaaaaaagatattactcacaatagtgagtaacaaaacccatgaagtatctaggaattacccaataaagaatacacagggccaggcaccatggctcacgcctataatcccagcactttgggaggccgaggtgggcggatcatgaggtcaggagttcaaaaccagcctggccaacatggtgaaaccccatctctacgaaaaatacaaaaaaatagctgggtgtggtgatgtgcgtctgtgatcccagctactatggaggctgaggcaggagaatcccgtcaacccaggaggcagaggttgcagtgagccgagatcgccctgtttcactccagcccgggagacggtgtaagactctgtctcaaaataaataaataaataaaaaataaaaaagaatacatagcacttttttttaaaacttttaagttcaggggtaacgtgcaggatgtgcaggtttgttacataggtaaacatgtgtcatgggggttgtacagattatttcatcacccaggtattaagtctactatccattagttatttttccatggtgtatatgtaccacattttctttatccagtctatcactgataggcatttaggttgattccatgtctttgctattgtgaatagtgctgcagtgaacatacatgtgaatgtgtctttataatagaattatttatatttctttgagcatatatccaataatggggttgctgggtatttctgtctctaggtatttgaggaatcaccacactgtcttccacaatggttgcactaatttacactccccacacagtgtaaaagtgttcctttttctccacaatcttgccagcatctgttattttgtgactttttaataatagccattctgactgggagacacccttttctaagttacagatcccttcataggaaatgtatacatatggagttttcaaataatggagaatgtctgtaataagtagtagcatgtgactgaaaaaatggcttctggtgctactagtgtctccagtcatctcagggacaacaccttttcagagtaagtaaccaggcacctttcaaatactgtgtcataggaattagcttcttccacctaagagaccaagctctctgtttcatgctttgggtaatcctttcctgctggagtctgaccaagtaaggatgggccttggttgaagtcacaatgcagcgagccctgggaaagcaggaatttggccatggctcgcccaacaagatgaccacctctttttgacactagtcttcccttctcacatgtatgccgtccttacttgcaatggtaacactttgtcctagcatctctctttcctattcctttctatcagaggtggtcttaatagtaagcagtcacaaaacaaaatgactgaaggtgattgcatatttagctggtcaagagcacagggtttggaagcaagacagacctggctgtgaatcctgattctgggcataatacttagtcccattaagcctcctttctcatttgtaaaagtgtgggccaataagacttaaggcaaaaggtagttgcaaatgttaaatgtgctaatgtgtgcaaagagcttagggtggtccctgtatctggtggtggccacttaaacgatggctgttgttaagtgacagaatgaggataacccccttccaccacatgcagagaggtattgagaatacaagtggaaagctcagttttctcttgacatgccatcacacccaaactaaagtgtttcaggcttacctcttgctgctttctgcaatatgatgaaaaattctagacccaaatggaatcaagttcttttttttttttttttttttgagacggagtctcacctgttgcccaagctggagtgcagtggcgcaatctcactcacggcaagctctgcctcccaggttcacaccattctcctgcttcgggctcccaagtagctgggactacaggggcccaccaccacgcctggctaattttttttgtatttttagtacagacagggtttcaccgtgttagccaggatggtctcgatctcctgacctcgtgatctgcccgcctcggcctcaagttccttttttaaaggttcacaaactatgtgaccttttaatgacaaaagtatgactttatacctctagagaaaattaccattcagattgttctgagctgattacccttgcctttcaactgcaaactttcccaatcaaaagtgtgagcataaagaacagcatcattgcaaacatgtaatctatctgacatcttgcttttcatataattgaaagaacacatatgtcagtttatactcaagcaaaaatgatatatggtatcaatgtgaaacatgagagatgatctaattttttctctcattaatgaatattgagcaaatagagcatttcaggatcaaggaatatatgagattctgtgtatttattttcttcattactctagctacagtgtcacccgagagtatctgggagatgacaaccaggcaattaaaggcaactctgtccaagcgctggccctgccgtagtgaatcatgaccctttctctggcctccccatggctgaacccctgtccttggggaacctaggctgtgaatgacttggcagttaccacaacacatactttttttatgtacacatgacatgtctgtgatatgatgcatctgctgtccgcaaaaccatctaaatggcttaacttctccagatttcattttaaaagaaaaagtcactaatctacatgaaaagttttgtgtttcatgtccagattatcttaggaacttcaactgttgttgtagggtgaggatggggagatggtgtctctcaatagatgaatgaagccaactgcccatttttaacaaaacacatttgtggtgaccattacctaatacattcatgagatgggttccactaacacagatctctccggtgtttgtttatttaattaaatgggagacatgtccaaatgattccttttgagatttctttggtctccaaactcatgctgcacattccatgtttacatagcttcctgaattatctgcaaaattgactaagaatgctgcaaaatgctaaaaataaaaacatatacatgtagaataagcctggctaatggttcttttcaggcatatttcttttcactgaaataaatgatagggtttagattttcaaccacttcctaacatgataaaatgagacacagtgctggtctctactgattcattcgttctgagatcaacttccactacaatgaataatagcaaatgtaaaataaatcttggccaggtacggtggctcatgcctgtaatcccagcactttgggaggccaaggtggcttgatcacctgaggtcaggagtttgagaccagcctggccaacatgatgaagccctatctctactaaaaatacaaaaattagcccagcatggtggtatgcacctgtagtcccagctactcaggaggctgaggcaggagaattgcttgaacctgggaggcagaggttgcagtgagccgagattgtgccactgcactacagcctgggcaacagaacgagactcccatctcaaaaaaaaataaaaaataaaaaacaaatctctgtgtttctgcctcatcatagaaaaggctgtgttaaattcatttactagatgaaaataagtattattaatttgtttctttgttctttgatcaacttcttatttaagaactcttactaagagcaccttcatgctatattcaatgctataactttgcattaagaaaatgtggttatcataaagaaaatggtgaggccacatttgtcagatacctgacatactccctgtggagaatttttaaatttcttactttgtaagaagcctgtcgtttccagtggatggtcaagatgaatcaggatttgaggcttaagattgttggtagtgtttactttgatttaatgactccaacagatgaggggccactgggcttgctgattgggtctgtactgacttttagccatcatgatggagagtaaagctcatgtccatgaaagacacaaatcataatgcagggaggaaggatcaatggagagaatgttagcataggtagtgatttgccctgtcatcgcactctcacctattgatatattttttcagtgacaggattctttcgctcagacttttttcttttgctattataatagttctcaaaatcaacaaacttttagttgcttagaacaaccaccacagaaaagaatgtgaatgtttattaccactgaactgtacacttgaaaatggtaaagatgatacattatatatgtatattttacctcaaatcattttaaaagcccccataatgtatatatgagaattctaacaataacagattctgtcatcttccacaaacattgtcatctacatttttcacttggaaggggaagtgcagtgagctctagtgaaaaggcatgcatggacttccacaggcagacatctggatgtgactcctgcctgccacgtattagctgggtgacctgggcaagttctttactgttctgagtctcaggctccccatctgttaggcagatataaaagaagagtgcttctattcacaatagcaaagacatggaatcaaccaaaatgcccatcaatgacagattcgataaagaaaatgtggtacatatacaccatgaaatactatgcagccgtaaaaagaagaagaccatgtcttttgcaggagcatggatcgagttggggggcattatccttagcaaactaatgcaggaacaaaaaaaccaaataccacacattctcacttgtaagtgcgaactaagtgatgagaactcatggacacaaagaagggaacaacagatactggagcctacttgagggtgaagggtagaaggaaggagaagagcagaaaaaaaataactattgggtactgggcttagtacctgagtgatgaaataatgtgcacacccccatgacatgagtttacctataaaacaaacctgcacatgtacccttgaacttaaaataaaagttaaagatgaaagaaaataaaattaaaaagtacttaattcatgatatggtttggctgtgtccccacccaaatctcatcttgaattataatccccatgtgttatgggagggacctggtgggagctgactgaattattatgggggtggtttccccagtactgttcttatgatagtgagttctcaggagatctgatggttttataagcaactggcattttcccttgctggcactcattctctcttctgccgccctgtgaagaggtgccttccgccgtgattgtcagtttactgaggcctccccagcaatgccgaactgtgagtcaattaaacctcttttcttttttcttttttttctttttttttttttgtttgagatggagttttgctctgttgcccgggctggagtgcagtggtgcaatcttggctcactgcaacctccacctcccgggttgaatcgattctcctgtctcagcctcccaagtagctggggctacaggcgtgtgccactacgcctggttaattttgttatatttttagtagagatggggtttcaccatattggccatgctggtctcgaattcctgacctcgtgatctacctgtctcagcctcccaaagtgctgggattacaggtgtgagccaccgcacccagcccaaacctctttcctttataaattacccagtctcaggtatttcttcatagaggtgtgagaacggactaatacaactcaaaatgtatgagatgctcaaaatgcaagctttgagatctaagagatcatgcaggtcagtttcctagcattgtatctagtatgtaataagtgttcaataaatgctagtttgccatgaaaacttcaaataagcataaacgttggagaaaaattactttaaatgggaaaaaaacctatttaaaaacatctcattgaggcataggatctgtgcacagggagtttacctgaccctgtaagataaagtcccttggctttcttcagcagcagaagaaaccagtacttagaggtggccagtctctgaaagagaggtattggcatcagacttgggagtggtcagttaacagctgttacgggcatctgctgggcaccgagcagaatccactcatgaagactgctctgttgcctcctgttttctcattgtgtggatgaagaaagcaaagccaccccaagctaaactgtaacccattgacaagggccacatttggagggtccactgtgctcagaatccttcaagggagaaaaagaataaaaagcaaggacagaccacatttttccccactggtaacagaacctcggtctctgagccctgtgtgcctgtctctccagtttccctggtagaactgctgctgcctctgccattgcatgtctgtttccatctggtcaggctgctataacaacatgccataaaataggtggcttataaacaacagaactttacttcttgcagttctggaggctgggaattccataatcaggatgtcagtagatttgatgtctagtgaagacccatttcctggtttataggtgatgccttcttgctgcatcctcacatggtgggaagggcaagggtgctttctggggcctcttagaagggcactcatggcattcgttgaggtctcagaatcacctgccaaaagccccacctcctaacaccgtcacattggtgattaggtttcaaaatacgaattttggagagacacatacattcagactacagtaacatctctgtggtggcaagtactgggcttgcaaaatgatgagaaacaggaccaggccagataccgaggaagaggtaagggaatccagggggcacatggaacagcacgcaccctaggagtatggctgtcaatatcccagagttggttctctctggaacccaacaaacccatattgggccattctccactcagtataccatttcttcacaaacactgtttctctactccagagccttgatggtgctcttaatatgagctaaggtacggccgggcacggtggctcatacctgtaatcccagcactttggaaggctgaggcacgtggatcacctgaggtcaggagtttgaaaccagcctggccaacgtggtaaaacctcatctctactaaaaatacaaaaattagccgggcatggtggtgggcgcctataatcccagctacttgaaaggctgaggcaggagaatcacttgaatccaggaggcggaggttgcggtgagccgagatcacgccactgcactccagcctgggcgacagagtgagactctgtctcaaaaaaaagtgagctaaggtagaaatttctttctccctgccatgaatccattcatattacttttttaaagtaagcattttgttttaacataccaacaggatacatacattttaaatggtaatgtctattaagtaccaggtgttttttttttccccctactccccttctggagagaccatcctctcaaaaatcagcagaagaaattcgtagcacagaaatcaagttctttatatattatttatctctctggctaaattttataccacgctgggcagtatttatgcctgtggtatgattatagctacctttaacatttggcctagtcttgaacgttggtccaggaaacaaaacttttcagccctacgtatcttgcttaacctatcaatggttgaataaatggatgccttttatcttaattcctatttatacatgacgatgttattgtgatgggaggcatatatctgtgtactgtcctatcagtcattttattcttcaggggaaaaactgtgaacatcatctggcttcaaatttggaaatggtgactatttaaaatgttaagcaggacttaaggcagatagttttttaaaaagaataattttattttttctttctttgtagcaatagacattattttgtttcacttctgtcaaatctttattcaaccataaatgtaaatcttgattgcctttagaagaataagattggctcacttgggactttgtttaggatgagcaaggctaaaatgaaagctcctgtgatatcagggtcagatacaacaagtatttgccaactctaggaaagtttcaccatctgaccttaattattccacagaagggagggtttcaccatgataacaaggagaagcgcacgcgcgcacacacacacacacacacacacacacacacatttttcttctcttcagtacctaagacgtcaacatttatacgtagaccatatgaacaatgtattaggtttctgccctaacaccattccaagaaagcaaagcccattttctgatactaacaatttagtttttgaatctgtttcttccttccaccattaccactattttataagatacccagaagaaatggttattatttatgcagggtttgtgctccctctgctggttctgtaattaactaataagtctaattcccataactatgctgatgtcatcaattatttttgtgcatggacatggaattacccaaatcagcatgttctgctcaaacatcatcaggaaaattagcagggggtcagaggaggacagttggcctagcgaagaaagtgtaccttttgatttgtccaagtctgtatttgaaaaacctaaatgcagttttatgcttttatttgctccatgctagagaaaaacgatctattattatttaaactagcatattacatcccatcctttcagaggtagataaggttggagataaataaaggttgttcatcttttgaacaagatttattataatatctgttttgcaagtgagaaaaaattagaagttcagaaatcatgtatgccttgctgctgagagtctctgcaggctaaaaaagtagatttctataagtggcacataatggccaatgccttgacttcccagatctgatatgtctttttcacaagtgtggagtcgggacatagccatttcttaatgtcagcacagcatcatgtattcatgaagaccataagctctgtagctgggtcaactgaggtttaattctggttctagcacttactctgtaatcctgagaaggttagggtacctaactttctagaccccacctttcttgtctacaaactgaaaataatattgttggcaagagttcttaccttgtaaagtcattgtaaggattaaatgaaataacaaatggtacttaaagtaaatggatgatgatgatgttgatctgaaaatactctggtcattactcatggtgattctttttccaacatgaaagcagcttcttttcctgataataaaaacttactgtgaaaactgggagggtaactttcaaatgataagggttcaatactccaggaaatattgtactcataaacaaatagtctgaaataagaggggcataattgaatggaactccaggagaaattagtcaagatagtgtagaaaatcaagacatttcttacagatgataagtcagtccaaccaagatcgcaattaaaaaaaaaaaaatgaagaaactttaaaatgggtaaaatcctaatacatagagatgatatttgagtatatatcctttggatgttttgtagtatttgttcatgcttttaaaaaatctatttagttacttgtaaaataatgccacacttttcaagcttttttgagaacctccttattctcaatcagtaccatattctggccatctttccatagcagtaaatgtggattaatggtcaatattattcttggcctccttggtcctgtcactcttagcatttatagataccaccccacccagttcaatgactgtattcttagatgatgcagattaattccaataacaacccaggcaaagcaaacaagtaaatccagagtcaggataggttacgtgtcgtccttcccaaagtcaggtatcaggaactcttggacgactcaaatcagcccctttttcattacctcttccaaaggagagtggtctggagacacattgatgttgcagggcctcaccctgctcaggagggggttgaggtgtcattgctgatgggttttggtgagggaaaagaaagaggtggctccaagtgctaggccccttcctctccctactccaagtttctctacactctctggttctctggctcttgtaggcttctcagagactctctgggtttgtatagatggtggttatttctgccatgtgtgggaaactcttgtgaaacatatgtgccaggggtaggaatcccaggcctcctctcctgcccaggggataccatcatctatgtttgtttttaagctggtcttaaaatgaggaatcttgtgctggaatagcttgctgtgatctgtttaactataatttttacctgtacttttcacaggcctggcctactctctgtcgtgaaaatatttggaatttatactttaaacagtgtaggccactttggttgttgatttaaaacatgctagaggtttttataatggttatttatattggccaacactgacccctctgcaatgacctgttgatgttggacaaggataagaggcactgaatacaatgcaggaaatggaaagagatcaaaaagaatgaatatgtgagcttagtaacaatgctttgtggcttaacacggagatcaattgtctgtgtgtgtgaggttttcagaattgcggtatttggcccacttacaggaattaagcgttctctttggagaaatttaagagtttttcaaactgtgttttgcattacaatatcaacgttgctaattctacaaaatcattcttgattatatataattatatataaatgtatatatacttaaagcatgaagaaaatacttcatatatctatatattgaaattattgtaccttttttaaagaaagcaaaacagccattgagtaaagcaagtgtctctggaaagtaaggccatttctgtggactgttcaggaattaacagcgaattctttcttctttctttgttttttttttttgtttttttttttttttttttgagacgaagtctcactctgtctctaggctagagtgcagtggctagatctcggctcactgcaacctccgcctcccggcttcaagtgattcttctgcctcagcctcccaagtagctgggactacaggtgcacaccatcacacccagctaatttttgtgtttttagtagagacagggtttcaccatgttggccaggatggtcttgatctcttgacctcatgatctgcctgccttggcctcccaaagtgctgggattacaggcatgagctaccacacctggccaacagcaagttctttctagcctgactgctggaaagggaaagtggcatactttctccaacctgtttctcttgcccccatactccatttcttccttgtattcaatggcagagtgtcagtttgcttgtagtccatttcctatgtcatttatcactgtacaaatgtcagctgtgagacaggagaacatgtgtgtttgacagctgcccaataaattatgcagaagaacaagttaaagacaactgcatggacttaaaacacacacacacacacacacacacacacacacacagatatatggaccgttagagaattggcactagtcgttgcctcatgaatatcttaaaatattattcaactgtaaccactgagcgaagtgttagcatggtttgagagacagcatcagagtaactcacaacttaaaaccaagtaaaatctggtcccccacaaaaagatctgaaaggagatgcatatgctttaaaaatccaagttttcagtgaatgcctgaataataccaccagttaggatggtggatgagatgatcctggaagcctggcccagccaggactgacttggccatacatcttgttccctgtgaaagtagaggtcccagcatgcgtttctgccttcagtgaaatcatagagagaagcaaatttaaatggaattacctttgcaaagttaaaaagtatattcctataccagttttggagaactctctgtggcagctattttgtgatttcttggagaagataacaaataattatcatgttggtggtagagaaaagccgtgtgttttgtggctcaagtctaaatccatttatttactctctttagtgaccccacccctatttgagaccgtgctactaacctaccaccttgacagtgcctttgagtcgtgtagccccacattccaccctgagagcgtctatctgtggaatgatggctggagataaaggagtcagtctgtagccaggaggtcatttgtcctcttcacatgggaatcagacttattgctgtggcccgagctatatccatcgtctaaccagctgagctaattagcccatagctgagctaactagcccataaagacatagcaggttattgcttacccacattagtaaagattcgattctgtttggccctcacaattttctctgtgttcacagttcataccagcaagggattcctgttccttaggagaactgacttcccagtaaacaccctgagcacagtcatctttaaatctctgtttataaggctgtgtgtgtgtgtgtgtgtgtgatgagaagctagagcatctgcgggattcaataggcagaaagctgatgacctatcatatgatagtaaatgattacgacatgagtgagagttacttggcatcagcaagctggtagttattttaagaaaggggaagcgatgttttaacacagtgggcaggtgtgctggggcaggaaatatattttacctaatcaaatagcatttagccaggtagttggcagctcagcctctctctaaaaccaactttgctttggtatttttctcccatttatttactctctttagtgaccctgtttggcacatctttgcaccatgaccaaagtgacagactttggtctctgttggactaatcagtgtgttctctgatccatgacatatgttccctgtagacatttaaagtcaacatattcagcacttgtggtctggcaggtcagagttattaactgagctgatagactggtttggatatttgcatccaaaagactttcctcctcatcctctaacacatagagccacacatccactcccaacaacacaaatattgactgtaccaatcatttattagcagtaaaaatttgagagcaattatttttttactgcgcttgccctgaaagacaccattaattactatattgcctgtggatgtgagccagtttcggtgtcccaggggcctgctccccacccggaagaagtatttgcagctccgaggaacacagcataggatgtcatctggcaagcagtgcactgacattgtcttctgaagtgagatgtcaagactgtttctgccatcctattggattcctcctgacttgcagtttacaggtcaggattggcggtgacggtaggtttccccaatggcctgaaaactccaaatagaggtgggtgtgggtgaaatttgagatgtgccagcttttttttttttaaagagcatgagaaatattccaaatcatcctagaataattatcagcggaagaacttttttgattgttgattctgcaggtctcatccagagggtgaaaagaattaaggcttctgatgggcagcaccagccagtctgccttttcagttctgatctttcaaaggcaggtgtgatgcagagatagtaatggtgctgttggatggttttcctcctcttcctactctagttagcagaaatgcaaaaatgccttttggaatttaaacttgtaccctaaaccagtttgaccacattttttgctcaatttggaaaatcacacaagctatttggaatgtatgtatgtatttattacaagtgggctattcctttattaaaaatatactgattagatgtatagcatgtcctccctgctaaaaagaaaatgaatcgtgacttattaatgtgcctgattacgtgataggcctcgatatctattggctgcactgatcagcttgagcctagctcttaccacaccttttgtattttgtgtgtgtattgattatgatgccaatctgcacatccatgagcaatgtcacccatttttaaatataacttggagaatagctaagtagtatgtttaacaagggcttgagaatgtttagtacgctctatagggtaaggaagaattgctactgagaaggcatatgggatcagtggcatgtcaatgtagaacacagtaatgtagaatggactggcatcatgagagggaagcctctctcacattaaatataaaaatatcttaggaaacattttccaaaaaccaatgctgttagaacttgcagtggaactgggctgacttattttcttccttcagaggtctttaattaataaaaagagaactgagagtaaaggaaaaggcacagtccatccagtgcctcctaaggacccttctcatcatcgtcctccagaggaggtacctatggcgtgtgctgcccagctgttggtggttgggagtgtgaatcagactgagactctgtctaggggtgctggtttgagttttttaagtcaattgcctcatctacgtaaagcatgcagttagaacaggcttttcttacaccccagactgaagcattttttagtcgagaagtcaatttaagggaggcaatatattcttttgcagcctgtgccataagaataaaagtccaggctgccacttattacagtttaactgaatgatggattctagcctgttttaattaaattacatattcaattatttttgtttgaaattaaaagcttgattatattaccgaatgctatgtaattttacacgcgttgttcgcttatttaacagtgaggcgtgggatatgattaacaatgtggctgccagtagaaagaagcaaaataattatttgttcaatatacaagtcctcatcatgattcagaaatcaatatgcatccacggaggatttgctcgcactgtggattatggaactcagtgtggccttccctcatttccctatgaatgtaaaacctggagactttggttcaccaggcaggtttttatttccctctctctctttttttttttaaagactgatgtttaactacagccgttgggacttaaatcagagcatccagtgcccgaatatgaatattaatcagatgccaggccatggagttcctcgccgagtttgacagtttaaaggatcagttagttaattagaagatgacatggcacgctgggtcccaaggctctgtcctgccttctgtctcctcttttcatttccctttttgacaagttggattacatcattacttgtagtttcacttgttagccccaccatgaaatgagaatattttatgctttaattatctgtgatttcttccccctttctctgcaaagaccaggcttaaaatgaaactcaaagaaacataagaatcagaggttcaaagtcccatgaaaatcagtcttgtgactccaaccatgccacacaccacattgcagtgagaaatagaaggtttgtggtagcatgagaaactgggttgtggtagtcatggtgactggttttaaatataaaaggtgcctgtcctgactttcgtgccacaagtacagatgtatcacaccaggtgtttccatggcttctctggcttgaggtgttacatactgtgaatatcctcaggggtagccacaaattattctggcctatgtttcttgcccaccctagtagctaaatgcaccccaatgtctgaacaattctgttctaaatgtttttttcttgccatgatattgctcacttgtgaagcttctattaaataaagtttacatgtggtctgtatagcagcttagtccccaggaaaaaaaaacaagattgagattagtgtttagctcttcaaatgaaggtttttctgatgccctaagtagaattaactcttcactcctttctccccatctactctgcagacagctgctgtggcacatctaaagtttaattacaccagacgctgagctatacaagggatggaactagggttcagcatcatccctagcaaacattaaaagtgaaaatgtaaaaaagaaaggaagaaaactaaaatctactgagcatttaccattaatgctgcaagccagccacttcactgagtaactctgtatgagtaatttctcattagtcttcacaacaatcgtaggtggttagaagaaaaaatgaagacttgggaagaatcttgccaggtcacaatggcatgtgctaaagaagctgagctgggatttgaaattaggcagtctgatcccagattcccctcctgtgctgaatctcacatggtaggtgcttatttacgggtgatgaaagagaaggatgtttttggttgtcagagggcatttctaataggttgaactcccactggcagtatatggagacagaagagaggtgggaagaagaaaatgtgtgtgctagatatgatccttactactggaaaagctatgatatttagggcatatctatatttatgtagaatgcaagaggaaaaggagctagcaggcattaccagagggatctgggtagatgaggaatgtatactatgaaaggaccagggaagagttaagaaggagtgtagagtcaacagggtcaggtgttacagggaaggtcaaggcaggtggtggtctttaggagaaagaacatcaacatggttaacagaaggctggggccacatctcagttccgccggtaagtaatctttttggactgcaactgaattatctctaaagccagtggaggtaaatcttgaactatggacctccacgtcctcctatttagatagtttgaatggaggacttacaacaagctcttggttgcggcaattgggaggtcattatgaccccagatgggacagctatagtagtgtgtgttcggctatggaggaaggattgcagagggcaaaccaaagagaatgggtggaggtgagaaagaagagaagttaagtgtagactgctctatggaggaacgtgtcagcaaaaggagggagagggagaagactggggagtggcagatttgggagccttcagaatgtcttgagaaacctctgtcggcctggagagggaggagacaggcaacaggaagctaggacagacagcacgagtgggagggatggaggtctgggagagccttgagtccgagggcacgaggcttcgatttcctgcacagactaagagaagcagtgcaactgaagggagggcagagcaaggttttgcagttgaagaaggggcacaaagtttgtttctccaccatgaaaataatttggggatgggagtgaatacagagacaaataaatggattgcaaaattatatatattagatctaatatatatatctaatatatatatatatatattgcaattctttatatatatatatatagtcaagaggttggccagaagcagggaaggttcagctcacgtccatccgaattagtcaggaatccttccatatcattgtctgactgtcaccagagggctgcagcaagctgggaagtgggagaaggcaggagctaggagccagctcacccagcactgtcgagagcaacagaatacacaagtcacgagggtaagacatgaaaacctactcactcgatgcagtaggattcagtattttaaagaaggaactgagaagaaaaggtcctcaattcgccattctgtgcaccctggttacccttcttcctaaggtaagggaaggttcacatcgccagaagcagtctgttttccatccacgttcttcctcagcttccctgggacatgttgctctctgtccccgccagcaactgaatccttgtacagagagtcaggcagataagaaagtgtagtgagtattctgtaaatttaaacttactctgttttgaaactcctgaggttatgtctaataattttttcaggtttttgttttccaattaaggtactaacgcatgaagtttttaaatgtccttataagacaaatatgtatttggccactctgttagtcctcagcattgttcccctctaattttaccagtccatgaaatccaaatgatggaatagtattggtgtatagagcacacggtatgattggtcattagctgctgtggtgggatcgtggcatggcttggccaagcaaagctttgaagaaacgctcactgcccatgtaactgtatttattccttttcctgaaataaaatgcctcacgccaaggtaggtcatggtagatggactcaaagagaaggtgggcagaactcagagtgctgacggggacccctctgcagtgaaaggtgtaaaatgaaataagctgttaatgttccccatttcattccaaaaaataaattgtggtttcagagcacccacttatcagctttctagttgatatcacccagcacacttgtgcttacccccagggacgaatcacctgaaagatgttggggtcaaggcatcaaaacatttggacgcacattgatgggttttacacctttgtatctctctgatattactgtttcgcttcagcaagcccactaatatcagatatatcctatcagggactattttaaatcacttcaattttccctgcccctgggctctggccatcagaccagaatcctaagcatgtgttgcctgtgatctagtgttttcctttcccccatttataggagagggaactttattagcttttggacacacatatatatcagttttaaggattaagtacaacatcagtagttcttacccggctctcaagtgtattgagttgttatattttctcagagaatgttaaaaaattagtattgccatttgtggaagcatttttctcttaaaccattggtcataatggtgtttacttacttattctctgaagtactgttttatagagaaagtaaatctaggatagaggcttggtaagtaatttcagacttgatagcacatgaaccttataggtacgagtgaattatgaagcctcactttgcagtgttgttttgttttgttttgttttgtttttctcaagtgtctttcttgcaactacttgttttatcttctgggtgactttaaaatattaaactagcttccctttagtgcctaagttatccatccaactcctgcttctcctagcctccaaattctttcagacacgaacacccaagttgcctatgactcaattaccggctgttggaaaggaccatctactacgagggcatgtcctgaatcctagagtctggccaagaataaaaacaaaaatctgtgtttcccagatccacttctggctgtggtttgacctgagatctaccaagcaagatacaaagtaatttggtaattgagattcccagttctgaattcagatttaggctctccctatctctgccccagtgtcaccctctcgccatttcataccttcctgcttcacttcagcctacacgccagtcacaggcctcttcaccagaaatcatttctatcccatcattcatttgccctcaagaccgccattcatgtggactcaccttccctaggcaccacagcccatgtacctgcttcatctctagtcagagagctctttctgcgtttcctcacgtgtggctctggcctggcttgtttttccctatgtctgtattccctccatcttgcaacaaccagctcagattgtgccttttccacaaaggctgtagtatccacagcaaaccaaaaagcatggccccaagagttatattgtagttaccccatgggggttatcaggagaaaccttccttactccaccactacctccactctctacagctgacttctctccccctttatggtttagtcttgtttcccaggagacatcatcagctgcttgagtatagagacaggctttacaatttttctgtattccctgagctgggacgatgtgtagcacagatgctcaataagtacttgcttgttgattaatcacggtaatgaagctatttattggtcataaaccacggtggggtttttgtcttcaagaacttgttgctttcctcttagaaggaagaggctggccacagtcaccattctgtcctagacacttagcataacattcacctgcttaaatgaaaggagtaggaggacagatggacatgccctcaagaaactggcacagtgcagatggcagcaaatcctctggcagagcacctgggagctagagatcaattctgatggacaaattggggtgggctttaatatgcatgggattggaaggatggagctcacatctcaacaagcacaaatgtatgtgtggaaggtattccaggtagggctaatgggtccaataaaagcatcatggattgaaaggattagggatgtcagtcacaaagcagacccaagcatggggtcaggggcaggatagcaggagacagataggaaaggctgatgagacagatgtgggaaaggtcacagtgaggctgaaattcagtaccaattgcgcgttcgttccagccatgttacatatggtgggatcaaaattatgtggcataaagatgagccctttttaattttgaaattgatgtgattatttttatagtaatttttaatacatagcaaatgatgctgattttccatttacagtggggattagattttatttcaaaagtactttaagtaaaaccatgtgaatagctttaaaaaaaaaagctggaccaggctcagtggcccatgcctataattccagcactttgggaggccaagacaggaacatcgcttgaggccatgagttcaagaccagcctgagcaacaaagtgagacccaccccatctctacaaaaaaataaataaaaaaatagccaggcatagtggtgcccatctgtagtcccagctactcaggaggctgaggcaggaggatagcttgagcccgagagttcagtgctgcagtgagctatgatcgtaccactgaactccagcctgggcgacaaagcaagcgctgtcccccccccaaaaaaaaaaaaaaaaaaagaaaaaggaaaataaatcaagttaatagtagtagaggctgtaagtcaaaaatcatggtagttccctgcagccggaggtttggaatgcacaaatatggaagtgggaagactccatgtggaaagtcacccaggccaatgactccaaagacttggggatggttggagtttggcaactgggaagccatctgcgaacttagagcagctgttgtcctggggtggctgcaagtcagatgcacacagcagcttcaggagggtagggggggttttgtgtgttttgtttaccactaaacaacagtgtctggctcatagtaggcaatcaatacggaggcgtgaatgaataggtggaaggtatgaggtgaggtttttatttccacccatgacactgacacccactgggccggtggtggggcgcggctgggagcagccggattcccacgcccccacttgaagtgagctcataggagacacagcctcccttcaggtgaaggaggaagaaagggagggagggaggtaggctgcagtctctgcctctgatcttataccaaggctcttctgttttatattgtcctttataaacaacaccacagggacctaggcaccttagtgtactccagctgaaagtggccagtgaagaggcctgggaggagctgtggcatggggggaccacataccccatctcaagggacagctttaccctgcttctgctcatttttgtcacatgggaatgcaaggtcatatgtgccacacactaggaattttcaaaagatgtaaaaaaaaaaaaaatccacacattttcagacgactgctgctgatttttttaattagtgcctaagttaaaatgttaaagacaccacaacagcccactatagagtttgtgacctctcacctaattcttttaacttaatgccatcacatctccctcgaggatttgtaacacctagtgttcctcgtaacatttttcccagtgtgttattctagtcatttttctgaatccacaataacacaattggtgtcacgttcacgtgccctgtagcgccagttctgaatctctcccctttcttcatcctatcacttgttctccttttctctccttagggtctctccccttgcagctaagcctggcttaagctacctaggactttgaaacatgcaaaggcccgccacctgaattcctgcaaatcctggcctgatgccctccccacttcccctctgtctcgagtgttcaccatgcatctccattggtttctaccatctgtcctgcctggactccaggcctcaaatctcttttcctgctgtcaggtggaaccccatatccaagggttgaggcaggtcctccaggagcccagcagggaacccccagggtggctgggagcctggcccagatcacagagccacaatgcccaccactgccccaccatgccatttagaatggagcctttgatacattggtcacattcacatgggcaaagagattacccatggaccatgattgagacccttcctatcccccagactcagcagggactttgtgatcaggccatttggtagctgtaagtattaaaaggaaaccttgtatctagaaggagatagtctcagcaagccatgccttgtcctgttcagcaggccagtcatttacagactctgtatgttgatcggcatcctcacgagtacattgtgtttcctggattgttttctttaccagcccctgccatttcccaggaagccagttttgaaagcctgtttgcccgcctcagcattcctaatgaagatgtaaggtcttacttgctttggggttacaaattctgatctcatttctgccatttgcaggctgtgtgctcttgggcaaattactctgcctccctgagccccagttccttcctgggtaaaataggggtaagagaaatacttcgtcctgaccgtatcatcaccaagtgtcaaagaactcttagctcagtctgtgattgttttgtcgtcaaattatggtccacatgccaaatccagcacacagcctcgtttggtacagtttgcaattaagaatgtattttacttttttttttttttttttttttgggacagagtctcactatgtcaccagactgaagtgtagtggtgcgacctcagctcacagcaacctccgcctcccaggttcaagtgattctcctgcctcagcctccccactagctgggattacaggcatgctccaccacgcccaactaatttttgtatttttagtagagacgaggtttcaccatgttggccaggatggtctctatctgcccagctcgtgatctgcccgcctcggcctcccaaagtgctgggattacaggcgtgagccaccgctcccagccgtattttacatttttaaatggttgttatataagtatctatatactcttcttgattttgcctcttgacccacaaagtgtaaaatattttctgtcctgtcctttctagaaaaagtttgccgacccctgcaccagaaaatgctggaagggctttccgcccctggtttgtgactgttcctttggtttagtgcacacccacagactgtgcttcaatacctttcaaggctttctctcttttcaggaaccgtccccctggtcggaggactgcccgactgttagtaggggaaaccaagttcctaagaggctgtgaatttcccacactctgtgcaagttgttctgagggactgggctgagttcactctctacacttccctgtcccatccccgagacactcactgtgcgaactcacagttgttcattccaaagagttagcaagggccttttggaggctgggtgttgtcataggcatttcaggggttacaaagatgacttgctcgggaaccgccctcgggaatttccaatctagttggggaaatgggggtacccatttgtcgccagtgtcgggaaacacagtgtgttctgggacctccaaggagtcaaggtgtctcacggggcgtccgtgaggcctcaggcccctcagcttgggctgcatgttgtgacatcaaggcgcatcaaatctccttcctgctggtggcctagggcagggatgcctgtattctggcctccccattctcagttcctgtggcagttgcagcagcctgtttccgggtctgttgcatgactttcagagactgatgctcactggcctgcgtgggatttggagctagccatgacaggcacatagtaggctgccctcaccagctgccttgctccccttcccagcagggctcagcatgtgcctcctctccatgttattgtaaaaaccgcaattacttttgcaccaaactagtacttcaagtgaaacagtgagccatcagtctcaggcagccaggatgttcctcaagatctctgcagcccaaagaaaatgtcctcaagacagcggcacctcaatcaatttggcaaaggaaaaatattttttcattcaaaaaaaaaataagagtctgggcgcggtggctcatgcctgtaatgtcagcactttgggaggctgaggtgggtggattatttgaggtcaggagttcaagaccagcctggccaatatggtgaaccccaactctactaaaaatagaaaaattagcttgatgtggtggtgcatgcctgtagtcccagctattcagaaggctgaggcaagagaatcgcttgaacctgggaggtggaggttgcagtgagccgagatcacaccactgcattccagcctgggtgacagagtgagactctgtttcaaaaaataaaataaaataaaataaaatatgagggcctaagcagatgttctgagcttacatagcttttcagaaacaaaaactgcactcacagctgctgttacatattttttactttgacattttttgtgtgtgcattctgacatctttgaagttgctttttttcttgctatgaagacacagttttcatccacgtcttactccttgttcaagaaccagtggccactcactaaatagggttcagacaagctgttgaaaagtcactttgacaaggatgagggttcacgagtgactaaaccatttcttcaacagattgtgatttgggctctctagccatgcatagtatacagggcttgtgggagcaactgtcctaccaaaggcacaaaaagtgattcttttaggtctacagccttgaccttcttgtgagagccaacttctttgttcatgtcagacactatagtccatctgctcactactgtactcccaaagcccagaaaagtgactggtgctgagcaggccctcagtatgtatctgatgctgaatttattcatcagatatttatggaacatcagaggaggaagttggtgggcatataccgctgactgaggcctggttcttgcactggaagagtgctctccagggaagaacagagggatgcaaacagaaagtgaccatccgtgtgaatcgtgccataaggaggcacctgggaaagtgtgcagggcactgaggagggtgggacagaggaggtgagacttaaggggcaccctgaaggagatggaattgagcattccaggcagaggtcatggcctatgtgtagacgtggaggtgtgaaggaacctgacccagttcattcagcactgccagaaaacagcacgcatgtccagaggacgcagatgaggctgggcagactaagagaagttgggtccatgcacatgagaaattgggctgtgtcttgagcttgatgggtttattggctgtgtgtgtattgttaaggactattctagcccggcgaacagtagtaactgaagggagagtggggttccacccgggaagaagacaagttagtgaatctgtgtgatccagaagaaagatggaaagatccccaggaaagaagagccagcgggcaggtctgagagatttgagagaggaagaatctatcccgtgactggccggtgcctaacaaagggatgccattgctccacacagacctgtttcctcctcagtcctgccatctcacttctttttgacatgactcttccagaagtctatatggctggactggaagttcatagcatggtgagacctgtgctcatcattacaatagagaaaacaaggttgtattttaggtatcaggcaaatagacaatccaatcagtatgctgaaaataatatgcttgaattagatagcttattcagcaattaaataaatataagttcatgtctacatctgctgactgtctgtagcaccctgatgacttatggaagttcaaagaacgattatgagggatattccctgggcactttaagccctttgtgtatatgccttgtctatctgtttgtctcattgtgtgttccttggtgacccctctttgcactttatttttaatttccatgaaggcaggaagaggcaggcgtctgatggtgcagagcacccgagaagagtgccttgtgctctggtgagcttattaggcactttccagtgatgtgattactaacttgaaaaagacgttaagcatcttcatcaaacaatgtgtgcctttgtgtggccagtagttttttcatttttactgggacagctgttctctcaaaaacagttctattataaacaacttgcaatcactaacagactttctttgcccttacactgcctctgggatgagctttactaaatggtagggtgtgtatcatcaagcaggtgaacctccttttttacacaattgtgtgttccttactataggaaagcaacattttgaaaataaaacaccattctaaatgtgctagatgattttccaaagtaaagggtactttaaattagaaaaaaaaaatcactttggtatgtcttgttttaggcataatgggtgcatgagtgttttccattttttattccaaataacacatattaatcacaagaatggaaactcaaccatgagtcgaatttgtattagtatcctttccattcctctccgcctcctgcagtgtgaggctcttagacaccagactcaccaaagtacccttgtaaggcagctgttctcaaagtgaggcccgggcacccctgggggtccagcacacttgtttctggggatctgtgaggtcaaaaacatttttgtaaaaatagcaagatgttatactgtcattcttttatgagcatgtagtacagtggagttttctagcggttacatgacatatcacaagcatttgaattcagaagaaaatgtgaaaatctagctatcttcaattacactagcccttaaagagcttttggaagatgtaaaactatgctttccttctcaaaaacttctgttttggaaaatatagtcatttcataaaaatgttatttatattattatgtaatgggtttgttattgctattttaaaatgaattaatgaataaatttaaaatttctgattatttctaatatgataaatattgcttaatataacccatataaacaacagtccttgaggttctcagtaattttttttttttttttttttgagacagagtctttctctgtcgccaggctggagtgcagtgggcaccatcttggctaactgcaacctccacctcccgggttcaagcaattaccctgcctcagcctcccaagtacctgggactacaggtgtgtgccaccacacctggctaattttttgtattttagtagagacagggtttcaccatgttggccaggatggtctccatctcctgacctcatgatccgcccacctcagcctcccaaagtgctgggattacaggcatgagccactgcacccggccggttctcagtaatttttaagagtgaaagagttcctaaggccaaaatgttagagaaccactgctcggaaatacagtgccatatgcagtaaaactgtcccagcttgttattgagattgggaaactttctaacaaagagtaaaaaggatgtgtaaaatttccctaatcatgtagcttaggcccatttcgactttgatttgtggatgtgcaggaaaaaggtgaaggactactttgaaaccacagaatcttatgaaaaacataacttaaaggccctcaactttgggggaggagagccaaccgtgattgcaagcctttttttgtggggacacccaagcacactttgttttcctctccctgctggtacttgccaattgtgctgtgactggtgggtctgtgagaccgcacaggtcatccttcatctcttcatgcagtgagtatgttttcctgagcaccttcacggggcctgggctggtagaaattcagacccagtccctgtcctcaggaagccaaaaggcttgcacaaggaaacagtcagcaaacacataagcgttaagtgaacagaatcattactgattttggaaagcgatgcaaaggaaatgaacggggtgatacgacacagtactttggaagatctgaaagtaaattcatacaagatacctggcaaaggcttttctaaggaggcttcatttgagcggagatggggatgggggttggaaggaaggagaaagggaagagcggttccagcagagagacctgcagaggccctgcagaagggcatggcttgctggcagtgtggtgaccaccagagtgggtgagcaatgatgggtatgagacattgatggacaaaggtgagattttacagagcactataggcgctggtgaagaatttgggtttcaatccaagagtgatgggaagtgatctgagggcttttcagcaaacggtggagtcatccctttctgctttgtaaagaccagcctggcaactgtgtagggaatgaactagggtagagaagcaactggtgagtaggcaggagaggaggcagagagcacccaggaggctctgggcatcatcaagtgagaatccatggtgtgcaagggcaataggcagaatggacaggtttgagatctaatttggggtcgaacagaccagactcactgatggaccaagggtggggatgaggcaaggagagtgaagaaatatgacctctgttttttattagagctgcttttgttttctcaaatcattgcaacaaaactctgcaaggtaattagcatcatacctattatttagagattaagagaccagagggccaataacgtactcatgggttaatagggccctgcgcagcatcaaaacaagtcagcaattactgcagctgccccgccccatctgtggcttcctttccctggtggcacgttccagtttactgctccagtccaggcagtgacaccaggtgagggcctggaaggaaggctcctcaccctccagcaagtcagggctgttagctggtgtaagccaagtcactgtgcctcgtcttcggtgtctgagaaatgggtccagaggcatctgctggccatcagcccaagtgggattttattgggactggtttattcacgtctcaggtgtgtctcggctccctgagaaagggagcattattcttcaggccccatggcacgtctcagcaagggacgtgggagtcctccccggagacagttaaacctttgtaaaatgaaacctttgtaaaatggtgaaggctctggaagcaattgtgagaattttaaacatcgaccattttcgttgagaaaaaggtacctgtgcatttcgttcaggcaatggggcaatcatttatttaaaaacaaagtttttagaaaaggtgtcaggcttactcagcaggacagaggctgaaggaggagagaagcaaggcagcaagaaccaaaattcttaaatgttgtctgttgtcacctcccaagtagaatctggcagctctctgctttcttcacacacaacttggggcacagcttcagaggtctaggcaggtatggaacatcagatacagatccgtagtaaccagtgacagtcagcccagccatatcatctctgaaatatctgcagcatctatatggctgaggggatggcatgaagctgactgcttctcttccttccagttagttgggcagcccttcaacaaataactttctgcttttggaattgaaaatgcatttggggaatgattatctgctttctcacctgtagggcagcctctctccttataacccctagctactttgcatactcatggatatatcctgcaatttaaatttttatattttattcatatgtggagtattttccctgcaactttgtaaagcactaaatattatatgaacattattcaaaacatgtcctttccataaagtccgtttatatgccatcattatctgcagcattaaatacattttatatcatcagaaattttatgatatatttaaaaatgaatttctacctagccgaaacacattagggattatcctaagagaccttgctaaaaatgcagtcatgtttatttgtaactgccagaaaatagcttgcaaaattgttagtgtcttttattattccctaccactggagcacttgcttgttaattagagaaatttcaactgtcatagttggcaattatagcttctgtatcattgtctgttatgaatagtcaatgagagctgattaatatgcatgagcagcagtatatatagcgtgtgcattggaccacaatccagctgccagagtcactcagaggagggagtggtgtgcgtgtatgtctgtgtgtatgtgtgtgtgtgtgcacgcgcgtgcatgcatgcatgctgcgaggggaggaagggaagcgtggaaggggggagagagttgttgtctagcctctgagagcagcgccaatgtgaagcgttgcagtcgcttgactcacctgaggctctccaaggataccttcaatgcctgcactgtaagggagctgcttttcccgggtgctggcgagaacggaagccttcctttgacgtttttctaaacatgggatgcagtctgtgcagcctgcagaagcaagaggagcagtacaaattactctatgaagtttgtcaggtaacaccctgcattttattccatagaagtgcataggcacccacctggccaagtgtaacttctaggaaaggtagtggggatttttatgtgtgtttttgtgcatattttgtgttctgaaagacgcagcctttctgacttttttgtgtattttctcttaagtctgttataaaattttccatccagtggcactttggtgcctgcatttgaaaatataaatagatgttgatggtcataaaatgtgtttcaagcagtcttgtcacaaggctccttcacaactgacctctctccagagtgtcgaactcaaagggtcaaagagtggtcatgcaccctttgaacaagttagagaagacatggatgatgattaatgctagcaaggttttgtctgtgtttacaaatagttataaggcgctcctttcagtacagcccaagccctctgctgacttggttcttttagcaattcttgtagtgggacatatggttcaaattggtacttctcacttgccatttctgtacctctgtctgtgaaatttttaagaacttcaaaagcaagtgacttgatcttgggtgctgtcattcacatcagatgacttgtatcttctgagtcattgtgagcaacatgaaaatttcagttgagatgaaatgggatatttacgatacaacccagataatttatcttacatctttgtcaaatgttttatttttaaatattcaagtcctactcttaactaggaggtttaatactgctgttggtaacctaccttggcaggtaaggattttctcctaaaatcattcttcaaatgtgtcttggcagtaataaaaaaaaaataatccagctaaggttttctttttagataagcactttaaaagaaggttgttacagcaagtgagaaacaaagggtgtgtgtttcttgatttataacaatcaatggcatattaatatattttttaaagagccagagtttttaaaaaagaatttgatttgagtgtcattttttgcttaggccaccagggggtgatatgcttaaagagacacagggagacgcggcaaaaggtgggttggctgcctctctggacaaaacctaaagataaaatgaccctgggtgaacaaaaagtatctctctgtctgtctgccttccccactgagacagagagagggtcaaaacaaaccttttgaggcttgctactctccttaggcaaggggtacatatcttacaaaaaacaagcatcttaaataagtcttgtgaataaatacatttccgacctgtgacttcacactcaggacttcactggacttaagtccttttcaaagcatttgggagacatgttggagatctcgggcaaaagcgctttcaccactggcgatctggcccccatcccttgtgtgatcatgtggtgaggtgtagtcctcagtttgccaagttatcccactcagtgagctggggagttctcagtgagtccagcacgcaggcaggaaacaagtggaacagcagacgctgccatttgggcaaggtggttctgttacagacttttgacgctatatttgaaatagctcaacatagtaagtcaaaaggtagtttttaaaatttgccttttaaaaatgttttgctttttaccatcaatgcacataaaatatcattcagcagtcacagttgtggatgtattaattacactggcaccctccaaaaagtaactctactacatctctggcaaatctaagtgaacctgtcttttattcttctgtatcatttgtgctcagtccccccagccccacccccaaacacacacacacgactgcccccaaaagagggagcctggattctgttgtttgttttttactaggtgaatttatgtggaaatacttctggctgaagcattgctcagtaaattgctgataaatgacttccatctggaatatacttggtcagcaatttaggaagccatgcagatttattttcaagaaactcaaactacttttcagacccattacccttgtgccaactaagtaaaatcccccctgctcctattctttgggagtcctgaaccgtagcataaaggaattcacaaaacacttgcaggaattaataattgcattctcgctcttattatgcaaagccttattagggcagagaaattaaggtttccataaattacagttccagaaggtccggtgcgtctggcttcagtaagccctcgtaacagcagcacaaagaggatcaaatattccagggctcagactttatcctttcctcatccagagataattcaaagagatgctcttcattagggccattggcaagctgcctacagtttctttttgggggctgctgtgagcttaatgatgcagaacaatggctttgcctcttgttgcacacatacctcattgtacctttaatcacattagaaaaacaacaccaccacataaagttgcctggtcattaaagggcattgcaaagagtgcagacgcatcagtgattggggccatgcattaaaagatgcaccaagacatttagggacactcaaacacttctatagggaggaagcctcctgcctacctggggtcgtaaggtcaggtcagacaagtatagcagttctttatgcttttatgataactgtggtgtccaggtggtgggggttgcagggcagtgtgaaacgtcaagacagggcctctgcctaccagaaatttgaaatttaacagttgcttcatgatttggaaaactttagcctgtcttgagtacctttgagtactcagaagcactattaaggtgaaaggacagggaagtaaggaagatgctttaaggttgtcaaggagtacagtctcctacttggataaattaattggcacaggagatctcatgttctgggagtaatgggatagggagcctcacagctcttgggctgtggctggaatccagctaagggtggttaccaggtgttggggccagggagtgggagttgggggtgtaaggatgggaaagtctgtggctctgtgggtttgatgccagtgactccagcacaggctaagcaccagccttgtttgtagccatgtactgtcaagtcaaggggacagccagtctgtggatgctttgaggagggtcttccaatggaggccaggaagaggggaacagagtgccaccccagccagtatcatttactccctccacctcttctaacatcgaccagagactttttgtaaaatggtgaccttttctaatttgatgaggcaacaaggaaataattctgattgggagttaagcttcaaactagaaattatgagtagcacattgtcctaaagtctgcatgcacattttcaggataaggaaaacttatctatagtcacaggactattcattactgacagccacagcattatttattgtgcacttactatgtgccggcacaatgctgagtgtcagctgtgcactttcccatcagatctgtacacaagcatgaagagataggtgatactgtcatccctatttcaaagagaagaaactgacatacaaaggaattatagtgggactgggagtcagatctgcactataattcccacatctgtgaattcttttcttgtataaatcattttccagcattgtcaatgaatgaatgatgatcaactttatagggaacctgcgggtcagtttccaaaaatcatgcttgcctttgtggggctaacataaagaccttggtgtctcagacaggcccaggtgctacgtggtacctcctgagaaaggttcctacggggttgctggtccttcatacctggaaagggtgatgtgcagagaaaaatgagctccggagtaacacagagttcccactggcttatcaggcaacctgaagaatgaatgatttgagaacgctgatgtccttttgcctctcagtaataacaggaaacatcacataagattaatttgtgcctcttatggcacttgaagttgttagctttgagaagcaaaaactttaccactaactgtgacctgccagaaaactatagatctgatacagatttgtgaccctttatacatcaatctcatagccagttggatagaaaaacacagatttccaaagtaaatactaatcagaatcaagtttatggagaagtctggaaacttgactttgcacaatcctgcttgcatattagctagatgcagtactcagatgagtttactgctgtagagcaaagagactctgcatcagctgagagtcagatgggtcacggttcgattaagtatggacccaattaatgacggttaattggatgaacataaacttgacctccacacagcagttttgaacctggcaaaattttcctgcaagtaggagtgtgtttgcttaaacagcctattaattctaaaagctttgttttagaagcagctttacattctgaattcatttaggcaaagtaggtatggaaaaagaaagctcatcttggccaggcatggaagctcatgccctataatcccagcactttgggaggctgaggtgggaggattgctcgagcccaggagttcaggaatggccagggcaacttgatgagatcccatcgctacaaaagaaaaaaagaaagaaatttaacttagccaggcatgatggtgcatgcctgtagtcccagctactcaggaggctgaggtgagaggatcacttgagcttaggagttggaggctgtagtgaactatgctggtgccactgcattccagcctgggtgacagtgacagagcaagaccccttctctgggggaaaaaaaaaacaagcccatcttctcctcccaccttgacaaacagggccctttattgaatatggagccagcatatggctgagaaagtcactttttaatacatggccgttatttgtcactaactgttgttttcttgttaattaacaatggattataaaccacttttatgttgattctgaaaagaaacgacctagggtgggaccagagattacctctcttctttcagtttgtctcctcttaagacacaaagctttagaggaccataaaggagttttccttcctttcccttaggactagggcttgatacccaccgtcctagcttaggtgtccttctgaagtattccaaggtgccctgcacttccttccaccttgtttccatatatatgttaatttggcctcccatgttacactgtaaactaggaagtctcatcaccactgttactctcagcacatggttggttgaataagttggattttgtagtgtttgttaggaagagtgaggagcaagaaaagaagaatacaaatcaggaatttagaaagagaactaggtgttgaatgaaatgaccatggtttggaccaaggaggtgaggatgtggaacagaggggacacaagacattcatttttcattcattcagccaacacgttcacccgacccaccaagtgctgagaaccgaggtgctcacccacttgctcactggctccccagtgcccttggaattcagtgaattaactgtggctcacagagccctgtgagatccagcctcttctgacctctcccataaacctcctgccctgctcatctgccctggtcctgcaggcctcctttcaagacccagaacccaccttattccttccttctcaagactttgcagctggctgttcctttctgcctgtaagttagttcaccaattcatctttgagctcagcttaaatgtccctctccctggaggcctgacctgacctaagaaaatcccccgacccactctaacctctctgtgcaccgctcctgtattttgttggcttgcttatcacctgttttcaaccccaacctcctggacaaatgtcagccccatgaaggtagggactttgcatcgttctctgtgaaaccccaggtcctggcacataactagtaactgttcaggatgtgtttaccagattaacttctgagtgagaaatgtatcaagtggatcccactttggtttgggaagggttttaccgtgacaaatgagtccatatccctggtctctaatggtttccacagatacagctgcacgttgccatgaggcagatggtacggggtcacaagggagaagacagcccctctctctgtgttcctgtcacccacctgccatggcatgcagaaggaaacatatggaatagtgaaaaaatccagctttaataaatgagttctcttgtgttcattaataatgcaggaagaggtcatggttaaatgtgggcggtggtgggggggtgggtaatgcacaaaagaataccgtcaacagttcggggtgaaggcacagcagagccccactaatcctgcattctccgaccagtgtggaattaagcagggaacagccttcactctctgaagcccacaaagccagtttctggcagtgccactgtcatttatgtgacaggcgtcataacgttggtaaaatgtagtcgagctgtgctgcggaacagctggtgctgccctgagaaatgtcaggaatgaatgtgtcctgcctagagtgacctgtttgcctacttgttcatcaagggcattttgagttgtgtattcattggtgaacttcagggaaaggatcccttttccatctactaattgcctgcctcatgggataatttttttttccaaatacatttgatgatattcatcagcttgtgataaagaatatgccaaaattatgcggaagtgaaagaatattattggcactaatgttcagttgtgctgcatgctggtcttgatttgagtggcagtaggaagcaaggacagcttttgactgtggaagagtctctggaagtttcttttaagtcattagttctcagagtagggtcctggcccagcaacagcatctgggaacgtgtttgttagaaatgcactttctcaggccccgccccagagctactgaatcagaaacgctggggtggggcccagcaatttgtttcacaagggctccaggtgggtttggcgcaagttcacgtttaggagcctatgttctgtattaaatcaaaaatgctggaagagggaggactgctaggtgacctaagccttctgacagattttcttgagtctttgtcggatgagtaggcagcaaagaagtcacatctcagacacttagatgtggatcaaaaatttagccatctgttggttaataccaaaaataaattgttttgtttgagaacttttttcaagcaaatagttctgtaatatctagtttacaagtagaaaattgaaggttattgaattttgtctgtaaaggagagagaatatataaaattttcagatacatctgatattcatcagcttgtgataaagaataagctgaaatagtgcagaagtgaaagaatatcattggcaccagtattcagtttgtgttgcacactggtcttgatttgagtggcagtaggaaataaggacagtgtttctgactatggaagagtctctggaagttgctgtatatacatgataaatattatgtatacattatatacataatgtatacatatgcatgtgtgtatatatatatctcaccatattctttctctgaatcactccaggctccagcattatcctatatcctcctaaacaagacaccccctgctcctacaaatactcccttcccagtagtaaataagaaagtaacctgattaatttccaataatgtgaatgatgatgggtagaattctcctgccggaagagaatgtatttttaagaaggaccttattacccaaatgaatctgaattggcagaattcttgtggaaataagtttgagcaggggcctctttctgatgagagctgtatagctatcaccataatgataggtcatgatttatagacaccacatctggggggctttcaggttacagcctgtcaattaaacaacatcattggtcaatctttagtgtacatttctagaagtcgatttttttgtatctgaggatgaccatttttaaaagtcttaataaagattgcccctaaatgagtctgtctgcgtaatacccaccagtgtataagtatccgccttacctcgctcttcaccccagtactcactgggtgagaaggggattctctttttttttttttcttcttatttgcctctttggtgttcagcttgtcaaggtgacagactggtaaaggatggaatcctgtttttaactcacaggattatatcagtcacaaggtagaaaaattccgctagggcagtggttctcaaacttgaactggcatcagaatcaccaggagggcatgtttaaacactgtgcgccacactttacccctagactttggatgcttccggcctgggaatcaccctttgaaatctactcctctaggataatcattattatataagactaagactgatgatggctgggcgcggtggctcacgcctgtaatcccagcactttgggaggctgaggcgggtggatcactaggtcaggagatcaagaccatcgtggataaatggtgaaaccccatctctactaaaaatacaaaaaaaaaaattagacaggcgtggtggcaggcacctgtggtcccagctactcaggaggctgaggcaagagaatggcatgaacctgggaggtggagcttgcagtgagccgagatcataccactgcactccaacctggacaacagagcgagactccgtctcaaaaaaaaaaaaaaatactgatggatgagtggatgagtgaaaggattggggaagagaaggcatttatgtgcctcttcagttctactagtgtcaaattgctttccatcattatggtagagaagttcgtgttgcttcacatccctgccaacacttggtattgtctgacttcttagttttccaatatagtgaatatgaagcggtatctcactgtggcttaaatttgcttcaccctgactatgaagttaagtatatatttatgtatattggccattttttagtttcttccttgtgtgtaaagtgcctgctccaactttttgcccatttctctgttggatttttcctcttctctgttggatttttcctcttcttccctggttgtaggatttggaaaaacatagtctggataccaacccctctgatgtaagtgttgtaaacatttcccagtttgtatcctgtctttgcatattctttttttttttttttttttttttgagatggagtctcactctgtctcccaggctggagtgcagtggcacgatctcagcttactgcaagctctggcctcccgggttcacgccattctcctgcctcagccttccgagtagctgggactacaggcacctgccactacactcagctatttttttttttttttttttttttttggtagagacggggtttcaccatgttagccaggatggtctcaatctcctaaccttgtgatccacctgccttggcctcccaaagtgctgggattacaggcgtgagccaccatgcctggcctgcatattctttatcatgttttctaatgaaccaaatctcttaatttcataaagtcaaatatatcccttttcttttggtttgtgcttgttgaatctttgctaggaaatgtgttttctctctctgagtcagaaagatatttacttatattttcctcccaaagttttatataaattttgtctatcacagttacttttttatatatggtaagatgttagagtccaacttcattttgtataaatacagattttctggtatatcttatagacaagcccatctcttcctcgtcacggggaaatgccagtttccctctgtggttggtaggtttaacaggcattcattgtaacattctttgtaattccatacgtgtatcttagaaattttaaaacttatttgacatttaagaaaatattaagaggagacccaagaataaatatcttttattaaaagcctccactaccccaaattctgaaggaaagtaaatcagaaatactaataaggggaagacggagtgggctggctgtaaacatctttacaaaaagtacaaaaagccacttttaaaaatatatatataaagcattcttcatctgtaaaaagattttctcaaactgtaacatttgttgtaaaagaagacacatctgtaagactacagttagaactaatgtttttataaacacatttcctaagtttacatgtttctagctaaataaatcttaagcaaaaagtttatctttttttgtgaacaaacaacacatgaaccaaatacggcaaacaaatgcttactattcacagcactaaaccagtgaaaacagaggtaatttgttagacatctgggagaataacagttttctcccagtgcgttaagcagtttaccataacacagacacattcctgttttgcctcacatgacaattattcccctcccttgcccaaaagtgtcagtggttgtggcacataacattagaagtgacatgcactttaataaagtaaaactctaaagaatatgaaccaattttcctttatcaagcagctgttttctattttgggagtctcaaaacagagaaattactatccttcataacaatatttcagttagcagcgggagatgaaaagcagcagctatttcccctcagaatcacaatggtattttatattcaaaattaagttccttttatctagttaggggatgactggcaggaataacttgtaatgcacatactgtacattttatatactagttactatatgttgcagctaactgcctccattgataagttcctatctggactaattccttaataagagatacctctgtttcctttgcttggtattttctcctttttatttctctctctggcgactttctaaatccaagatttatagcattggactgagtacctggaaacttcccagtatttaaagtttgagttgtttagcatgtctgtctaatctctccctccccagttaaattaacttgaactttttgttccaagttgcgccatggattggaacaggaagtagtggctgttccccaaagaggaaagggagggagtcaaccaccactgagaaattgaccaaaagggtccatgcatcctttttctcaaagttgtccatgaagtctcagaaccaactctactccatatccaaccatggttaagaaagccaggggagggaggacacagttccagtgttgtattttttatccttgaattaacaagtgccaacccaaattaatatttcagtgattttttttcctgtcctcataagaacaaagataaatagcttttgagtgttacttatcctgcacaggctttaaatgcatgagttatatccaaaagctcatgtatttctcacacagccccttaaaagtatagatacagttattatttccatttcacagatgagacagctgagggttaaagtagttgacaaagcagcctggagtcacacagctggtaagttgcagagacaagatcataacacaggactgtctgactccagtgactttgggcaggctccctcactcatcctgtcactcattccattaaaagacattagtgggcatctccctctagtgttctggaggaatgttccagtgtagtacaatggaaagaaaagtccctgccctcaaggggcttacattctagagagagatggggtcagaagttaaatactacactgctgagaatataattacaatgtggggtaaaggctctaaaggaatgtggttctactgcagaaacatcatataaagacccaaacaagaaactccgcccagttttctcctctgtaaaatggaagtacttgaccaggcacggtggctcacgcctgtaatcccagcactttgggaggctgaggcggggagatcacgaggtcaggggatcgagaccatcctggccaacatggtgaaaccccgtttctattaaaaatacaaaaaaagagctggtcgtggtggcacacacctgtagtcccagctacttgggaggctgaggcaggagaatcgcttgaacctgggaggcggaggttgcagtgagccgagatcatgccactgcactccagcctggcaacagagcaagactctgtctcaaaaaaaattgaagtagttttgtagctttagcagttaaattgaggtatcaaggtgatatcttatatcttgctcaagtggaagttcatcctgttttgttaaagcaggagaaggattccatttgcaagttaccacagtctagaaccacctgattgtcttaaaggcagcatttagtgagtgcctactatgttctccgggtcatatgctgtgctgagggacaggttaaaatagccacttgctcacagtgttcatgtcctacttcagaggacctccctctccctcagagcctcagttgtaaaaggggaaggcttgggttctttttatggctctgccattgagtgaccccggaagagtctctgggcctctctgaaccttaaactcttcttctgaagctcaggaatatgagctgtttctcctagggtgttaggagtgtccaggtgagctttaatgtgtgtgtgagtgtatctggaacccgtatggcacagtgtaggctctttatgtgggcatatagtcagcacttcatatctatgggttcttcatctgtggattcaaccaactgatgatcaaaaatatttggaaaaaataattccacaaagttccaaacagcaaaacttgaatttgccacatgccagtactatgttgaattcccatgatgtaggcattgtattaggtattataaataatctagaggtgatgtaaagtatatgggaggatgtagttggtatgccaagcctacaatagcaattaggacaagtatatggccatgtgatttaaactatatgggaggatgcaaatactctgtgtgccattttatatcaggaacttgagaattcatggatttgggaagatactggagccaatatctcatggatatggggagatgactctattgtctaataggccaatctaggggttgaaggaaaaagccagcatttctagagaaggtgggggcagccaggcttccaaaattgggtcaaagagggtcatctttatgggttgaaagtctcttgggggacagttaaaatgatgggaatagatccagaaaggtcaacttatgtggacatcttcagagatcattggtgctacatcattttcttgaaaggaacagtggagaataagggtttcaacagaagtatgtaaagccaaagcttcttaaaaacaatatatggtggtggaaatatgcagtacttttagggaaaattctcagattcagtatttgttcagtagggtatttattggacacctccagtgtgccaagtaggggcatccactggcaggactgcagtggtccaactaacaaggtcctggtcttagatggaggaaaacatccaccaagttttatcacacagatgaaaatgcaccagcgcagccagcacttggggtggccagtgccaagtgcaaggggaacaaaacagaggatgggacccagttacgatggccaggctgggcttcctgagtcatctcaatatggagcagtcagtgtcagccaggcatagtctccaagacagaaggagtcatggatttctaggaaaagcatttcactgataatactttaatgtgcatctgtgtcctacactgtctcgtatccagagagggccatgtttctaaggggctatcccaagtttgacacatattcctggagctaaagcaagtgaaaacacttaggaaagtatgaaagctctgtgtggatggtggtgtatgactctgcaatgtatattttaaagaagaaatgttttggaaagtcattaaaaatgttaaccacatccccctccaaactaaaaagctgatgaagggaacatattttcaaattacacatttaaaaacatatatgtttatatcaacaaaagatagcctatgttagacccagatatagttgatatgccaagcctgcgatagcaattaagacacgtatatggccagaaatgtcctctggacatactcagcggatggtaccgctgcaaaacacgtttttcaatgagctcatctgtaaggcacgatgaaacgaggtcaaagaaaagcttagagagcttcatactcacagttttaaactcaactgagaaaagatttaaaggaaaaaaaatccctgacccaaacaaaagcagggggaaacttagtgttgcctaaagcaactaaagaaaaacaccgcgttctcctggtggctgttctctgccgttgcgtgtgcaggggatccgtatttttgcctccagcatgctcatttctgtttctcagacccacacaccattttgctgagacaaagctgcaagtgcatttccacccagctgggcacacttgataactacactgatgcatcagaactataaatgtcacccccgtcatctccttgtaccctctgataactttactctttaaaaacttgttaacatcctttttccagccttacatttgacataatcaaagtcatgtacatgaactcccctctctctctctgaaaaacccctacgtttcctcaagttctaattgcattatcaagtgttttgtttggatcattaattccttcccagatgatttgctcctggtaggtttctagcaaattctacccatgtctaataaatcatcttacaaaatgctgcaggtttttctccgtcatagggatctagtccacacgctaattgctgtgcccctgtgaagttttattctcctacctctcactaaaagcaacccctttagcttcattgttaaaactctaacaattcgacaacaaagaaaagatttcagaactgtgctttggccaggccaagtccccagagtcatttcaagcttgctgagctggaatatacccagggttattctgtcatctaaacaaactttctccaggtgaacgcaggcaaggcatctgtctcttctgtgtcccctgttggacctgggagtcagggagatgaatgatccattgtcctgaggcaacactaccatgtaactaacctgagaacaagaaaatgaagtcaggaagttttaactgcatagccatagggtggggaaggacgggggcccagttcctgcttccaggatgtgataggattattggggctggagattgtggagttgtagctacaaaggctgtaaagcattcatagaagaccagatggggagtgatctgaaataattcagaagggtgtaagtaccagtctagtgaggttcctcttatattaaaaatcaacattatctaatttcccagtttctacaggtaaggaaattgaggtccagaaatgatcagtagtttcttcagatgcaagtatactattttgtttactttatcatttgattcccagcatgtatcaatggactcacctatacatgaatcttgcagtgtttttagcccagttcatactttccacaaacatgtttatttctgttcagttctccaaaggtattgtgggcctcctatgtataagtcaggtgttctgtgcggctaagataaggtattaacccaccattcttatttttaaaaatgtaatcacaaaaagcaaggatcaattattataatatggccatattttaaagcccttctgtgcctgtgaagtcgagagggtgagtcattttatttcccattttacaggtgataaatatcttaggatgtcattattattctttttgtgccatttgtaaatcacatttataaatctttgagaaagaagtacacacttaagtttacttttgattcatataggttctaaatcttcccaatttctgtgtcttccaccgtagatgtctccactgttagttattcctgctccttttcattggttcttcttgcaaagccaatatttccagaaatctgcaccaatttctcacagtgattgcacatttcaatggagatagatagcttggagacagtttatacattctactgataaaagttgtctctggttgcatggaagggtctcagcaaactgagaatattttggcaattcagtagatagagccagattcattattgcacataagcactcttcagtggaatattcatacatattacaaattaagtttgagctgatagggagggtttctttttctcttataacttagtcaacacagcagaagagaggcaaatattttctcctctagcctaaatttcaccaagttgagcaataatttgcaattaaaatacagaattttgacaaagtttaggacaaacataaagttagtttttgtgctttaattctgtatgtgaactagataagcaatgaaatggtatttccccgcacgtgcacacacagcatagttctccagaatagttcaattgtcataactcagtagaataaaatacggaccactgctcctcactctaagaaagcctgagcagcaagggctgccctgctaactgcaggcttctattcagttttccttatggggagaagcaagagggagaaaattatcaaaatttgcataatgaaaatgaagaaaatcacccatgataatgccactttgaactgttgatgttccttaacttacgatggagttacatcttaaaagtcaaaactaaaaatcatccaggtgtggtggctcatgcctgtaatcccagcactttgggaggccatggcaggagttcaagaccagcctggccaacatggtgaaaccccgtctctactaaaaatacaaaaaaaaattagctgggcctgatggcgcatgccatcaggaggctgaggcataagaatcgcttgaactcagaaagcagaggttgtagtgagccaagattgtaccactgcactcccgcctgggtgatggagtgagactctgtctcaaaaaaaaaaaaaaaaaaaaaaaaaaaaaaaaaccaaaaaaaaacaaacaaaaaaaaaacctaggcaggttaaagatggatatggtttggattttttaatatggttctaaaaacaacgtgggacagttcatgtgaagaacagagttttaagagcaagtgggtagagcttcccccactggggctagggaatatgcatccctttttgcagagagtttcagagatacaagattcagtggcttttctagccagtcacagaataaaccattcttccttctgcatccaaccttcctgtggggggagataaatgattccagagtcttaggaagcaaagtttctagaaataaataataccccaggttagggtaagaatagtaggcagtgtcctcaacatccacatgtacttgtgagggaagcccccaagaaggaacagtgacttgcgatccagagcccattacagaaagactatgtcggtatggcgtgatctagtagcagaacaattaaaattctcaagaagcccaggatctatctaagtcctaatttatttcaagcttttgaaatttagtgtttgcatttgctttgtcttgagacctcacacgtcaagtattttagcttaacaaagaataatgtacttggaggtaagaggccaagttcaagctcccaaactactatttagtagctaataacccttaggcaagtcacttactttctggagcgcttacggtgggagggctacccttcctgtcccatgtcatcctaattttttctaatctcttcttcacacagcagccaactcccatgatcatgtctctaaggtacaaacagaaggaaaaacaaacaaacaaacaaaaaaaacccttaatcttgtggattctccaccctcctcttaaatcatctcaaaatcaaagtcttttttttttttttttttggtgatgaaagtacctaaaaatctactctcttggcaaatgtccagtatgtgacacactattattagccatagttaatactaaaaaaatgaaaaaaggtaactataacatgatggatatgttaatttgcttgactgtagtaatcacttcattacacatatgtacaggtgttccttaacttacgatggagttacatcttaaacccattttaagtcaaaaatgcatttaatatttctaacctactgaacattgtagcttatcctagcctcccttaaatatgttcagaacactttcatcagctgcagttgtgcaaaatcattaaacgcaataataaaattttgaatatctcatgtaatttaatactgtactgaatgtgaaaaatagaaggattatgtggataccgaaagtgcagtttctattaaatatgtatctctttcactgtaaaagtgaaagatcataagtcaaaccatcataaattggagatcatctgtatagcaaaatatgctgtacatcttaagtataaacaatagaaaataaaaatattttttaaaaacaaagtccaacctgaagcctccaagagtcagcatagcctgcccttgcccatgcttccaggcttaacgcatgatagtctgcaccccactcacgtgcaccagcagcccatcagttgtaccaggttttctcctaccacaggacctttgcacatgcctttccctctcctctcttcctccccacttaaatcctgccctttggattggtgctctacacctgttcctcaggggacctccctctccctgccaggttttctttccttctctcagtagtgggattcctagcatccttctccttcaccagactgtcaacttcctagggacagcttccatttctagtcttgcccaccactatattggcagccccaggccgtgtgctgagcatggagacattcgcaatcattatttgaccaataaacaaatgaatgagccattgaatgtacagtgccaagcatactgcatggtacgtagaaaataacgcggaagtgttaagcattgctagagattcaaagaagcaaaagatgattcctgcaataaagtggctttagtctttgaagagtatttcaaatgcatgccatactctttagtttatcgctgatgtagaattatttttaaatgctgtctaggaaattggaggcatttgagaagatctgtcataatttatttagaatgttgattatggacaagccaactaatgattactgttataggaaaacaaaagaaaaaatagcccattctatcaacattcactggtagttttatattcatactggcaccaggctcttttaaactgagttgtttgttttgaaccactaaaaccatggtttaatatcaacagcattttcttccaaggatcctatcacaatcaatttaatgaaagtttttccacatggtctgtaaactgcaagatgaactagttggctatgcaggagccaaaattaattttgatcaagtgatacacatcataattttatttctttggatagaaaacaaaacaaaaaaaaagaacaaaaaagatgccaaaccactctttgtaggttacactaaaattctgaaacacaaatccacaagacccaggaaattctgtttacagtgaatcaactttagctttgatttttcctggcattcattggtttgttacctgacttttgtgtttaaggaattttcatagtcttgtaataagaggaacaaataaagtataggacattaagtccaatagcatttttcaaaatttgctttctaagattcaggcgcttcaaaaaatgtgtgatgttgcttgttttcttgctgctcagagatttctctgactctgagacatgactgacattacttttgtcttaactgtactatttttttatgccattccatcccaggggccttagacgttgcctataggacatttgtagggcaaacacattgagacaacttagtaagaaatgaattgacagaagaaaatcaatttccggtaggttagtgaagatccacaactagtgtttttctccatcctgcttgttaaacataccattcccaaggtgagttcctgggaaaggtcagtagactcagctgacttggttctcagggtaaagcgcacgtgcccttgccatggcatgcaccatgaacgttctcctttggcaagtatccttctcactggaacatcaccttccacctccgggccccacctctccctcttgttgatgactgccccttttcactacaccctcacatcttggcatcctacagtcaccggtgaacacctcggcctcctttgctttacagcccaggtcaggtaacagcactgccggctgtgctgctcggtggttagaacacgcatttcgaagccaggcagacctgggtcacatccccatttctactttcataagctgcacaacttttaggaagctgctcagcttctgaggtggtagagataacaccacctacctcaccagtgacatccttattctgaagacgggatgaaatcatgtgtgtgaagcatttattgcactgcccgacacagaacaaaaacccatgtgtggcgttcagtgtcatatccttgaaatggctcctcccatagacatgactgcaatataaactgcttttcatgggttttcttatgtgacttatttggagtatggtttttactgaaatttggcagctggactttttaggagcccaaacctaggctagtatttcccgaaaaagatagcgtttactgagtgtgctatgagccaggcgctcttctaagctctttacaaggaatcttcacaaccctgtttatagatgaggcacaggaagaggctagaaaatttgtctaagtgtgacagttataacaacagctgacattgggcactgtgccaagagctttactttaattacatcattcaggtatcacctatgaagcatgtacttaaatattcctcatattctatcgagggcactgaggcacacagagatggagtaatttacccaaagtcacacatctgataaatggcagagcacggacttagacccccatgtgtctcaccctggagccccagtgatgcccactctcacccagtgttactgagccttcctcaccactttatcaatacatggcacattgattctgcaaatcaatgaggataataaatagctaaccttcactgagcacttggtatgcactaggcatgaaccataactactttctatgcagagcctaattaattccagcaacaactctgtgagttaggtcctgctgttaacccattttacagagaagaaaactaaggcatcaagagatgaataacctgctcaagatagcacagctcacaagtgctacagcctacttgaaccccaggcaaacagacccaaagctttgcaccttgacaatggccctcatcagacgtagaactcctgcctgctcctctgcatcttcatgcagcatccttaaggctcctctaattttaaatgtaaatgactatggtgacacaaaatagaaaacaccattaaacgctctttttaactccgtgtgataacaattccattgatggaggactcttcctgtcctttcctctgatgactagaggcttgagagtagaaattttattgtagccagccttctagactctgatgaaaacagttaacaaattcaagtttattcaaggtatttatgagaccaatatgaagtttacaccagggagaggaaatggcataataaagcggccttcataaaggcttcgggcatgacgcttgcaaaaacctaaccacaccttcctccttcaatttgtggctgtatttgcctttacagcaagagataatgccaagggatcattaaatgcaataacattgacgtgtaaaaaagaagcatgtcatcttctatattgtgaacttaaagcatgcctctcccaattcaaggtgaaagccaccagcatcttaaatgaaatgtctgcagatgcgcagatgccctctgtgtctctcgtttttgtctgcgaaacagtgatagtagctgtacttcccttgtgtgaggattacatgagtaaatataggtagagtgcatagaatagtgtctggcacagaggaagtgttgtaccactgttgggtttatcatgattaaagtgtcaaaagctccagcattttatttgaagtattccggacactcatatataaaaaggtgagcaacgaagcacggagtggctgatagcgactttcatggactgttcaaccaggaagtgctctgggagacaccgttttcaagcccttttgctatagagggagctgagtcacccagcagccccttctatgtgtccagggctgaaatgcaggagtctggaggccagatcatcacctgctgccactatggtggactcccgacctagtgaaagccagaagcaggaccaccaccagcccatacgagcacttctgcgtgatttagaggaaggcttctcttcctctggatggacacggcctctagcccactgccctacttgccaccttgcctttgctcacacctcagcctacacatccctaagcaggggtactacagagaagttctaaaacagagacagacagagaaatcagttatccaagaaaagccactttgcatgttgtgattttctgtgaggtctataaacttgttatttcttgtctctttcctctctgtcatttttcacttgaaatggccccaccttgtcacttgcagtgcagaaaccagagacagcaggagagcttggccagagccacttggttattttgcaaacactccaagaccttctggacctcattttttcattctcgacaaagcagaggatactgtccttgatactatttttatcctatcaagaaatggtctagaataagcttaagagcaaaaccacttctcactgaatacttgtgtactttttactggagaagaccctcaagttgcaaagaacttaggagatgtagaagatagggagatttggctgtagaaacagcttgttgccaagtacttgccattggctttcctataatatctggagctactgcttcaaattatcacctgtaaggtgatgcaaaaatgtacatgttaatttttcgattcatactggttcagatatactgtagcttaatggacatttggatgccattgcttgaaatgagatttcatgtgatgataccaaggtttccaaaggagatactaaggtgggattggtatctgaaaagaaagtattttataaaagtaagtacatgtatgtttttaacctctaagactcatctgttttactaatcagaggctggtagccagatgtattctacatttaggaaaacagtaaagaattttaaaatgtgagacacatcagttagacacaaagacgacttttctaacaagaaaattacccaagctataaatttatctgtgcaggatgcttgaaatggagtaaggaggggatctgatggttgtaaaaataccaaatctagggaaataacatcaggatgcatttagaaaataccatggacaaactgctgaggtcccaactagaacccaacacatccatacatagaaactgacagctgtggcagtgccatctacagatctccatctctgaagtagacgtactttcctcagaaacacgttaatttgaacaccattcattcctgaaactcacatttcttcttaactgccataatacctgcattttagataagttgccttcccttctccaagccctagaggagactataaatttgaaataaattaagacagacaggagttgcctaaatgaaaaaaagacttttttttatccaacctaaatcagggcttgaaaccttttacttttcagtatatagtgtattatcgtctattgcttccagtgaattctatgttttaattagtttgaaaacataggtgtgatattttacagaatgaaatcactccccctgtatttaattaaatgaaccctataaaagttggattttagccaggggcataatttatactaggctgaatttaaaattgcattcgtactttatatgaggtcatttgcacatgtaatagaaatagaggtgactgtgatatgctgaacctcagaaagcaaatgtcccccataaataggtacttagtttctaatttggagagagtatagtatgccttttccaaatactacattctaaaatatcctgaactgcttacgattaagttgtagaaaactttgaaggctctctgggactctgtgttttgaaaggtgctactgtatgacaatagtttaacccatgatatttctaagtagaccgtgaaaaccaagcctctctctggtttatgggcccggctagcattccatcgtgtgtagtctctgagtcactcgatgtcttggtaaaacgccacccataatgcattcatctttccatttcttaagtgattcccatgtgttgtagcttcatttttcctccaagaacttctttcagtgacattccgtcagccaagaagggaactggtctcactaaataagctcagtaaattcttgctgaatgagtgaatgactgaaagatagacagatgggtcgtcagtgaaatttacctcccaaatggaaagctcgccagctttgtgttagttctcaggaccaactggaaaagacagctacaagtacctcctaggaagagcaacagcaatgttattccggcccaaattgaacccggaaggaatggttccatgccctcagcataattgtctgtcttgtctcaggagaccttatgctaaaggatctctttaaggtcccttagtgtcatgtcatatttgcagcagggatgtttgccttcagactaactgattggatttttgccataattgcacctaagtcccaggggaccagccagagccttaggtgaataatttaagcatttaatttataataaagtttgcaatcagcatttcttgttccaaaacattccatttacttggttttaaagctgcataaactgttttaaaggcaatctgctcaattgggcaagttaatgatattgaatttgaccgggccaaacgtcactgggtgcatcccgtctataatcacagccatcatcaccactgttttgtgtaatgtagatgcaatgctaatcctgagaataaaagttgtcattctcggttggctgacggcgtgcaccggagtcatcatctcgctaagagtctcagtgatgtgattccaagatgacagtgtaataagtgttatgtgcacaaggtaattcaaaacaaatttggctgcaaaaatggatcgtctaggatagtaaactcccgccttgtctcatcatcttttaagagaatgtaatgatccctaaaataccttgtcaagaagctcatgtggcaggggtcaagtcctgtaaaatttttctgttgcacccccccccctcctccaagaatcccaactcgagggctgaaaatatccatgtgcatattggtaccccagcaacacacaagatgggcagggagcttctgggaagtcaagaagccttacggcatacaaatgtctcttaagaacacctcactaggctgggttttgcttctttgatttatagattgtttcctcctgggaaaatgtgtctcttctactacaggatccccacgagcactggagtcttagtaaattcttattattggcatttaggcattaccagtaagttatctcatctaaactttatattaccctaaaaagcatgatgctatatttattttgcagatgagaaaactggaactgagaacagttaaattgcccaaagcccacagccaggattccaacgctggcttcatcccacaattgctgtccctgcacactccacctctgagctgtgaaaaaggaggaggtcatctggcttgtggaggggcttatttgaactgtatttgattgaaaactgcatgggctactaaaattgttttcttgggcacagttgtcagaaatgcgtttctgtggaacccagctgtaggcaggggggacattcttgtgtgggatgacagggcatttctcagtcaccccaaagtcccagttctccctttggggttgctactgctcttccctctgtaacctgggcagtatggatgctgttgtatcaatgccgtgtaacagtacccaaagctggacagattcagaacagctttcctgctttttgtaattgagtatgcctcaacacagaggagctctttgtagccaagaatgcttttagctttagactgatccaagcgggtccttcatgcatcattttcttggtaccatttaaacatccactcaatggtactagcatttggtttataaaaatgtatccaagtaaagcaatagttgccatcaccttgctataaaaatgaactaagatgtaatcctaatcagagaaggattttcactaattattttacccacatagaagaatgtctctaggaatgaatgagaaaacatttgtgcctaattttacaatatatctatgtgatatttacactttttaggatgttttggactgtaggtagttaatatccaagtcaaatgacctaaagtataaggaatgtattattgaatataacaagaattttggggataagacgttctaaacttggttaattcacttattcagtgatattattaggaccacaattctctcatttttctactctgccatcctcagtgtgttaagctggcctctgaggccagctccccacatggtcccaagatgctgccacaagtccaagaaagcatgcagatgacttgtctagaggcaaaaaatggccctttcctatctcatgtcctagtttagtcctagtttaaggatggacaaaacctcagagctccctagcagctctctcatcccatccaaccagccagaattatactgtatacccatgtctaaatccatcacgaggcaaaaggaccaagaccaccatgataggcgggagcccatcacaatccacacctcaaatctcccccagagggaaagatataggatctggtagaaaggtaacaaagagttcttttagcagagagggagcattggggtgaggatgggtgcgtgctgcccaggcagctgacattgcctgctctagtgtttgtaagaattatgtgtctctaaaaagtgtaaactcataggttcctttctggacacaactagaagatgcctggattctaattccccatcctctcctcacctagcttagtgttcctcttaagaagaacaggaagtcataaaggaaaaatatgccatagtaagaaaatcccattcttattcctttttggcaaaaggcctggtatttgtatactgttaaatagaagaagaacaaatttgacacatcttgtagcacccactcgaaaatcctaatatctgaattcattgtgggtataactaacgttggtgcaagccattcccagggaataccaagggcagaagaccagcgtgactgggtggtattgaccacagccacacctcctaagggtgctatatgttgcattaatttattctcagcaacaaatttgctgtagcattgtaaattcctgtattatgtgactcttggtgtcacacatttaatgaaagatatggctcaaatagtccggccccagcatgaattccacagcaccccaagttgtttttcatccccatctacaccccattccttcccatgccaagccctcagcattctagggtctaagcagggaagcacttaccaaggtcacttgggatagaaagctagaaagaattctttcttgtcctttcattcttttctcaaagggagaaacatggcaacagtcgtagtgttaaaccctgctttccaagtcctccaggatggggaatttaaaagtttggtggttcagacagttccttatttactggtgcactcaagtcattttgtgacccagagttcttttctgccgaactccctcgtgatgtaaataaattacttaagtggattgaatccaaatcattaataacctccactggcatgattcatttgggcttcattacaaggaaagaattcaacatctatttctcaacccaacagttgtttacaacgcacttcagcctaagagttgttgtccctacagggccagagtgaaagggtttgggggaaaaaaagagaaaaacagctttacaaccaatacttatgttctgcctggacatagggaaactgaagtgctctgaggatagacctaattgtcagcatgctttgaagtccaagatactaagggaggaaaatgtatatatgccaaataggaaaaggctgtggttcagtgttcattttgacatttataaatacatgctaaaaacatgcacattgcaagagtggactattaatctaagagatttaaactcaggaattgctatgaggagtgacttgaatgggtcagtgttctccagaaaaactttgagaagctgagcaacttctgcagccatgtgtcctatggaatatgattcctataccatcattttacatttgctttttaaaaaccaaccaaaccacttgaggaatactataatattaaaatattgtggagcctgatacattttatgcagtccaatcataagatgttaccagactttctgcatataaccacctgaacatagttcctttgttttatgggggaagggaaaagagaggataaattaaatcactggacttccatctaacttggaacgactttgatttttagaaataagactctgatttctatttcatcttatgtcagctgttctaaagatagctgggttgagtgagttttgattgtaccatttgggagaatcctggacaccgcgtccaacgttctgacccagcataaactagtaaggtcctctcatgaggtttgaggctctagggagggagatgatcttactttcagtcctgccaacttcacaggactatgatgagagaactgttgagaggtatcttcatttaagtcatgcagcagacagtagtcactcaataagtgcaggctttgaggatgcagtaatagcaaagcactgcacacagtgggaaccaaaacagcaattaagccagcggtcacttcccccaaacgctggccatttgaattccttctccataataacttgccatatgccgctatggcctgaactgtcatttacttaatattttcaatggactttttaaagagcgaaaggattattaagaggaaacttcatattacttccatgaagggaagactggtatcatctgacacaaactggaaaaatacacactattaaaacataacaatgtaatgaatttctagttagctattattgcctgataaaggctcggagcctgaggctggccttttctttcacaggcaagattagcaagtgatgaaattgtgttaaagacattccacggggaagctaagccttcccgctgtgagatttattattgcatgccagatctgaatacctccaaactcactctctttccaccaggcattcttcgggaaacctaaacacagagaactgaagttctctgacaccaccacctgcttctttcttttagctgcttacacatgaaagcaggcaattcatgtatttgtccttccgttttctgctttattctaaccttgtcccaccctaaatatttttccacaggtcaacggcagagacttatccagagcaactcatgaccaggctgtggaagctttcaagacagccaaggagcccatagtggtgcaggtgttgagaagaacaccaaggaccaaaatgttcacgcctccatcagagtctcagctggtggacacgggaacccaaaccgacatcacctttgaacatatcatggccctcactaagatgtcctctcccagcccacccgtgctggatccctatctcttgccagaggagtaagtaacctaatcttgaacccctaatgcattaagaagtatttccaagttggtttctttctcttctatgtggtgaaaaaaattaatgcaccctatagttttcctccaagttgcccatgtttaactttattgtttatagaggcaataaatcgaatcctgctcaaaaccgctccgacatattaattactttattataaccctggagcggacttattcaaattatatcctaagaacagaattacttacaaatgttgtaaaagttgtttcagaataaaatgtaatcaccccaaatggtaatttgaagatcctgcagttattactagggaatgttgatcattcttttaaatagacaaaaaagtaagttgtgtgtgtcaagagagccctggaggttgtgccttctgctttcttgggtctcatttcaagcctggatccatgtaataagcccgcacatgcctcatctaagtactgcatcaaccaattaaataacagctgcaactcagcacgccacatggatttctttacacacacctcttctctcaacttatttctgccagcgataaagagtccttcagaggcttcaagtcagacaaacctgatgctcaaagtgatttctagttgtggaacttgggtaacttactttgttttgtggggctgtatttttcctatattaaaatggagataacagtatcaatctcttatcattgaaggattaaatgaaacaatatgtgggaagtgctcatggggcatatggtaagcactcagtaaatggtaccagcgatcaccgttaatttagtgggtgatgtaaaatattcaggaaaaaatgaagagcaagacactttctgtgatagactgctggcccccaaggtgtccagttcgacatagcttttaacatagcttttcaaggccaggcgtggtggctcacacctgtaatcccagcacttcgggaggccgaggcaggtggatcacaagttcaggagattgagaccatcctggttaacacggtgaaaccccgtctctactaaaaatacaaaaaacaattagccaggtgtggtggcggtcacctgtagtcccagctactcgggaggctgaggcaggagaatggcgtgaacccgggaggcggagcttgcagtgagccgagatcatgccactgcactccagcctgggcaacagagcgagactccgtctcaaaaaaaaaaaaaaaaaaaagcttttcatgtgtgactttgcacatctgaggacacagcctctccagctgatgttagggtcgcccctgtgttttctcatctcagctccatctcggatcagatcattgacttgatacattatttcaaagggcattttcacctcttacaggagaatccactgggtaatacctgttggattcctactagtaactcagtagctggagtgagcacatgtttcctatggttcagtcaagttctggataaaggcttgcccttcatcccttggtcttagtggctagctgtcattggaacccaggactaattccccaggcttgacagagtaggtttggcagcagctggtagcataaagacagaggacagggcatccgtctcacattcactcacagtgtgcacatgtgcaaagaactattatctatctccttcatttctcatgactgtccctttatacagatgaggaactgcagactcaccaggttccactgagctgatggaaaggcaggtcagtcagaccccgactcccagctctgaaccacagtaccctgtagtgacccattccatcctctggaacaactggctgattcactgagtatgatgatccagaccatttatctgacgttacagaccaaactgcctcacattattgatgaagcctttaaggctacttctgactcttaaatgttgacctgtcacagtgatgggccttttagaagctaaacctgtaatttcctcttaggtctagttaacatgacatgacttatcccctgggggcgacttgagaaatgtcagaagagtccagaggtcaggcctcttcaggttctggctgcaaggtcagacaacagcaagagcgtgtgtcgggactgaatggggaatgttaagttgatgcttgaaagcccagaccttccaacagtatcctcagtactaaaagccctttaagtgcaggcagtatatttgcctgatgggtccagaaaattgaaagccagcccttgtttgaatggccactcatgtctgatctgttgtttcaaaactaagtgcctgggagggaagactagagcccattgattgctgtgctgacctttgaggacgtgaaggtttgggtccccagccaacaatcagaggctgaagctttgcatctggcaccgtggactgttaagctcctttcaaagctgctgatggagtatgttatgattcccactgccttggctccttgaggttgcattaatgacgtttccaaagatgtcgtgagttctgtggactgtgttttgcatatgttgtcctagggaaacataagcttccagtctcctagcagagtgaatgtgtgtgtactcattatatgtaaacatatacacacagatgcacttatgcctacatgtttgtatgtgcatttcaaccatgtaagtgcatactgtacgtttgtgatatcaaacatattattgtgggtaacattcaaaaagacacggtcctaggtaacagcagaacagtttcattctcagccttttgaactgatctcagaggccagcacatatcttagactgttgcctgggctcgagcctagttctctgcagagataaaatctaacaatgaagcaataagcagtaaaatattgtcctgtttcctgcgtagagatggagttagaaatcagtcacgctgaatcacgtgactggcaggctccgggatgggctctgcaaacaacaaagcccatcaggcttgcactttgcatcttaagtccttcaggaggaaatgtactaaaggcaaatggtaaaattaggatgatggaggtcctgaccgtgctgagagccccatccagagggaagtgagtcatgaaagggcccacaccctgggaattgctactgtgccactggcctgacaatgggtgtaagaaaaacagatactgacaacggaagaagggctgtaaagatgttgcatctcttttcaggcatccctcagcccatgaatactacgatccaaatgactacattggagacatccatcaggagatggacagggaggagctggagctggaggtatgaagaacatccttgtctcattttaggagtcattattaagaacacagaatgcctaataagttctctataagcataaattagtttacggatgccgatggaaagtaacaaaagcagaaccacttttactgatgccctttgaaaggcacaactgagattcttcttccttccttggaaacagagcttaataatcaagtcccaaaagcagaaatgtaaactttttttaatttgaatcacttaaaagttaggacagtaaatcctgttgtcaacctttgaatccacataatccatacattcttgtaactaacataagcctcctcaccttcctcccttttatgtcatcaccactctttactcaaaggcagatggctcaagagtaggtggataaattacttgagtgaatgctagcccgccctaacaaaagggtttgttcactgcttcacttgcttcaagtttgctaacattgatacagaagaaattaaacaagtctgcaactcttcttaagtgttatttgaggccacacaggaataaagattcaagatgctacataatgtcaaataggtctctgttaaggtttaaaatatttagaggacaccaggttgccaacagagttctacttcccattttccttttattaagggtgatagaaaatacagaaaacactaacttgtataatatatttatattttggggaaaacacttttatatttcaatggggtttcaaaaaatataacagcatttttgaaagctgattttatggaataaggtaaaaagacacctgatgttgacaggtaagcccttgggtaccatcaaaaggtcacccaggaaaaatcgaacattttatccaatttcatggctaactgttgtgtaatctatgctgtcctaccaatacttctgaagttgaattgttcagtggcagtaggttctgtgcaaggacagaagcagtcaaatagtagaaaacagctatgttcctcaacttaaagttaccaagagttctcattccaagacagaagttaaaaatcaataattgtgtgcaaacgatgacttcactgatggttagccagatacagtcaaatcaaaggacttgttgccagtggcatgactgactctgtgccagttttcagaaatttaaaattttccctaaatgcacctggtctaaacagcaatggccagtattctcactataaaaacttgactgtttctgcttgctgtcagccacttaccaaagcgcttgccatttaacaattgttccagaaaatgtagttttgtcattttcaaaaatcaggattctgcctcttatttagtgtcctatcaccccagcttcagggctgtttggtgaagcagccgtgactccttcaggacacttgttccttaatttgttatgtatgttccttccaaagggggttcataatgaaatacatttgggaaatgccagactgaagacaacgaaacagatttcttggaggacttctgagaatcttgactatctacctagaatcccctgggggagtgggcagaatttcccccacctctctggccaagtacctgtttatatttcctcagtctacagttctctggaacactgttggagaaacactgctctccaaacagagggctatttcgtaatctttatgggacgacactgctttttgatgatgtaattgtggcaaagtagagttcttttaaaaagctgtaaagtgtttcagaagctagagttatgaagtagtagagactttgtagtctttggtatttagttaaacttgactttgtagcagtgggttctttagttctttttttagtttctaatacctttgagaatctgatggaacctacagccccccgctctggaaaaatgctcctgtctgtgagagcttgcatatggtttcaggagattcactgagcccccacagtatctgcccaatttgggccattctgccttacagtttttccttatacctgactatcaccagaactcttacgtgctttctatttctctttaattcgactcaacttatttaaactacggtaattttattttaaaggaaacactataccactgcgtcaagcagaaagtcagcatccattgccttaaatagaaaatcccatacaattaaatacagtggacacaagccagtgttatttattaaatcctggtgctcaataagggtgcctgctgagggttgggagcctggggccactacatcctgccttttctctaaggagattagctagtattaaagaagtgttaagactagcccagactgagtctttctcctcaaagcatgaagcacctgagagcatcctgctttcagcaggagggagccactcagaaactgttccctagaaccctgttgttcaaagtgtggtaggaggaccagcagcctggctggtcaaagtagagttctcacctaggagatgtgggaactacagaaacttggccccctagatcttcagaatcagaatctgcactttaacaaggttcctaggtacctcggtgcccattaaagccagaggacccctgacctacaggccacagacccagataaagcagcccaagctatcatttcctcttgttctcttgagtcacaccagcgaggcttttgtggtgcctttcattcactgcagtgtcgagatgtgccgccaagtcacgaatattgtccacactgtccctgcagtgtaacattatcagggcctaggaacgactgagcccctcgtaggcatgtgacactgtgttcctaagactgcttctctcttttcatgaataaaagcagacacaacgcaggtgtttagaaaactagtctggtattaatattttaagctagaccttggatgccatcagactttatattcgtgtttattttcaattctgttcattttattgtctcttacattaaatatactgtttggccctagaaatgcaaaatcacgaagtcaccactctgcctgcccttaaggagctcacaagccattaggaccattagacattagcttttcgtttcttcttaaacaaccagaataagggcattctccatctctagcccctttgaatggttaccctagagtactctgagtccatagcagccaggaagtcttgctttaacattttgtccacagcaactcagatgtcaccaggtcatttctcttacctaagtaccttctcataaagtgaacctggcagttttggacagatgtcgtcctcagtcctgtggtggtgatggctcaggcctcctaggctaggaacatatcagctaaggcctactgcagccactcaccagaagggtctctccactagagaacagtagctgcgcctccagcattgctctgtttcagaggtgtgtctctctggtcagtcagttcaagaaggttaattaataaaccccgcatgctgagaaatgagtttcctcaagtgggcccagttttcagggagactggcacatgcctgtcatccctgcttctacacgagatttcttagaacagtcgcagtctgccttctagattccatcctgttttgttctaactcttgggttcaattttagaaaaatcaggctgttatttaagtaaggggccaatctcaacagaccacttatcatctaaattgaattggactaaagtcagcgccttccaaagaacagctagttccatggatattatatacgaggaaaatatgtatgagtgtgttgagatattattaaagcaaatgcacagagaaaaacagatggttctggccagacgcagtggctcacacctgtaatcccagctactcgggaggctgaggcaggagaattgcttaaacccaggaggcggaggttgcattgagccaagattgtgccaccgcactccagcctgggcaacagagcaagactctgtctcaaaaaaaaaaaaagaaagaaaaagaagaaagaaataaaagaaaaacagatgttctcccttttaaagtacacaaaatgatcatatttaggtaagtgtcaaatctctgttattatgagactgcttagagttaaagggattacacccagtgtaccctagggttgagcagacaaataattacccataaattttcaggcactgaacacctgctctacatcttcctgtaggcaattaagaaagaaaatacatgcccaaagaaggcttttccttttgtctattgttttaatttcccaggcgattcatcagtagcatcctatgtaggctgcgaaactgctgtcacctgtattgtattctcaggatgtgtcacctgtattgtattctcaggatgtaattctgagaccagaaaggaaaggaaaactacaatttcaataggagactaaaatgctctccaaacctggtttcatagaggaagctaagtatatcagaagggaaccaggattgacctggagattatgcaggatgccccagccagtctagaatttttttctttagcctttgaggcacaggacaaggaatagatctagggaacctttcctggtcagccccatcctggattgaagtggcttcctcattacttttcctgtgtaatcagggtctttgccattttttgtactatgcctgcaaaccaggacctacctcggcctgcgtggcagtgccccagatcgttacatgcctcaatcttttcccaaatgtcatctctccagaggatcttccctggctactctctgaagcatccctatgccaccagtactattatttacttttttttttgtttgttttgagactgcgtcttgctgtcgtccaggctggagtgcagtggtgcagtcttggctcaccgcagccgcctaggttcaagcaattcacctgcctcagcttcccaagtagctgggattacaggtatgtgccaccatacctggctaatttttgtatttttagtagagacagggtttcgccttgtcggccaggctggtctcaaactcctgacctcaagtgatctgtctgcaatggcctcccaaagtgctgggattacaggtatgagccactgcacccggcccattatttacttcttgtctttcttccccactagaatacaagctccctaagagctggactcttgtctaactcatttactgtatattccttttgcctagaccatgtctggcatatagtaggcacccaggaaatattttttgaatgaaggaataaaatgccttgttaccctatctcaaacataaggtccttgagggaaaatgcagtctttaaagatatttctgtatcccacatagcaccatgactagatacagaaactgttgagataacttaaatgtgcacagcaacctggaccagtaagttgaagagttatgctttagtggccagtcttcctggaggtggataaagcattgaaattagtctttgagatcccctttaattaaggtagctgatgctgcaacagagagtttgaatcaacaaggtggaatggccctcttaatactcttcattggaatatcgtttcaatttcctctgaaatgtcaggcttaactgttcatttttatcaacagtccatctagaccagtaagcaacaagataccagtaacaggggtagctgtaatccagataatgctactacattattcataccagtttgattaatagtcttctttgaaatcttatctccatcacagacagataacatattgataacttctatgctttcagcaatatgcttaattgtgtaaaactagatgagagtcacacagaaatgctgagaatttacaaaccacccagtaagtttgaggaattttactttccactgagccccaaaatactgtattttgttttaaaaccacagaatggctaagtttgtcgaagttcaatgacttgctcaaggcaacctccctcattacagatggagccaaactggtttttcatttggatcatcctgccttggactctcaagctcattcattcaattttattgagcacctactgtgcacagcatacaaatctagacactgctttcattgcacaattcatcattcagctactattgccttactgtaatctttataagaaaacaaggtaaaccataaatccgtacagatccagaggcaataccagctcttacactgttgtttttcaagagcttctgaaagcctattatggatcactctgtgcttaactgtcagcaaccagattcttctctgtgatgttgaaccatcccttgaaaattaaatgaccaaggctaagtggtatcctgtgccttctaaatgaagcttttctagcttttgtttagagttcctaagaagggccagagataaggcaaggaaatattatagcccacaccatcctgtctcacatccacgtcaagtaaatacctagagtaagctccagaataccctttgcttttttattattggaaatgtgcttcaccagcatttgttcatccaatatcactcatcctttgataacacagaccacttctaagatagaaaactgctcctggagtgctgcccttgaagtagaacactgccattcttatgtctgttttaaagatccagctgagaatgtgactgtccccatgacggtttgttctgagaggatttatgatgggtgttgaaggctaaacgcagcattgggctctacgccattctgctattgtgagggagtatgtgttctaaaatgaacactaactgggaacagaactattaattggaccctcttctctcccgtgcaaaaatatcaaactgcatttatggagaatcgattactaatttactaaacacaggtgaggttagtggcaacgtataaaaagtgtgtaaggaaggaagcgtaagtggttcttgattcagatgaaaatatcttaaagcaataaatgttttgaatatcttctgttgcagcctgaaactttgttctaagaaagttttctccctgattaaaaaaaaaagtcataaagatttgttggaggaattgacagattcagaaggaaaaatgtacagaaaaatcatgattagcaacatgaacaatgtcaactactctgtagcttaacagtcctccaaatctctgtcaatcaaaatactgacaaaagatagaacagaaatgcttttcaggttaggttttatcaaaactgtattctaaaatctcgtgatatcaggccacctacatgtttggtagtaggccaaataaatctaatcgttttctacataacagagcgtcactatcacattctttaggagtctttttcttgcttgaatacaagcaagaaatacaagcaaggaacgaaaatactcataccttacacctctcaaatggaacactcaaatctagaagtgtattacagagttgtgcttgtcagactgtactgaaaagccacaaggaccaggttggctggtttgtttacttttcagtctgtctctaaccaatacacggtcctactgtgtgtgactgtgtaactcaccccatctgcgacgcgttcaccaacacctgaactggtctacaccttgtccagtgagacaagtctgctaatcatgcccttggttatcatgacaatgtccagctgctatagaggtttctgaacacttccctcaatttctgtgctcacctcgtcatgaccaggaagcacgctttgagtagcagtagtagtagtagtagtagtagaaagtccagtagaactgtagaatcttctgtacttccttgaaagatagtcaccttggcggccagccattcagaaaaagttgcaacttgaattatcaacatttcttgtctttctcatttttcttcctacaatcttcccactgctcgctctctctgcttgggttgcacgtggacctgtttcagcaagatgtgtctcctgcaggggtagcactgggcgagctacatctgtgcagttggacctaaaccgtcgtgatatttcgttgattcacactaaccttgaggaaatgtcaaaactgaaaaagtgttccctcttatgcatattcaaatgaagtgtaccctaagagagacagggggatgtgtttgaaacataagaggatgatgtatgactagtatatttgtggaaacataagaggatgatgtatgactagtatatttgtggtatgcaaattggttattccaaagtatttggaaacccaagtatttaggcttgctctcattgttaaatatgacccttaaacccacttaattatcagaaattaatggggtttcatttaataagaacttaccatattgctagagctataattaggaagctgttgaattaattaacatattggtgttcagaaaataatcttagtaagaggggcactgaaatatacccactctgccacaaacaacttcttgtgacttcagggaagtaaccatacctgcatgtaattattatactactggtgaccgtggactttctatggggcagtcaatgtgctaagagctcttgtgtgcctcatgttggtgactctgggaggcaggatggcaggtactagtgaggacacggaccttagatataataacaagctcatgatcgagctgctagaaagagggagagttgggatctgaacatctgtctttacagttccaactcttccccaccacattataccccatatatcagcaagacagactgctgaaagtcgttaagatcatggcagtcctcacttaaaaccttttgatgggttcccattatgttgaaataaaatcttagctactcatgctggcctgtgggccctgcccggtctagctctgccacctggccaccctcagcccacttctctcttccttgaacatggggctctggccatgctggcctagggcttttgcacctgctgttgctccacctgggaagtgtccgtggcgcctggcacccgcctttcatcggggaaagttcaagaagtatcttccaaataactgctttgagcttctccgcatagacagctgcattctccttccccgctaagaagacccttgagagagaccacttggaaatagtccccagataaagtggcacgaagaccccatctcagagcccctccattctcctgcttggtgagcagataacactaaaaattagaccaaaggatctaccggagaacttatcacgtggcccttcaaataggcttgcagcttggagctacaaaaacttgcacaagtcattggcagagtgggcgggggagtgacttagcctggttacactgagagccctaggatggcaccctaaggctccaacaatttccaaagttctgacttcattctgaagcacagactaactggcaaatacaatagcatgtatcccacatttgggctcactttgcttttctcttatttaatttgcagtaatagcggctgaaactaatttctcaactgtaaatatcacagctgttgtggagaacattaattgcacgctatcacattaccctcctttcttggatcaatttatgtgtaatctgtttgcaagttctatgactgtgaatattaagggaacgcaatgtgaaataatctaaccaaacacattggaaacatttgtactgaaatggctgggtggtttggggtatggaaatattcttgtttgtggcagacattgaaaaagtgtttttgaaaagccctgccccagaagtcttgacgctgagtgaaatatgggtaatttttctttgggggatcaatgaaataactattttcaaaatgactttatattgagtgaaaggtcagaaatgccgtaggcattgatcctgtgtccataatcactttttgtttagtaagttaaccggccctacacagttgaatgcaaagaaatccagttcctcatttgaagataatatttttaaagcatttgacatcccctcaactcgcattgcctgctggagtctcactgggaatgcctttctttgtctaggaagtggacctctacagaatgaacagccaggacaagctgggcctcactgtgtgctaccggacggacgatgaagacgacattgggatttatatcagtgaggtacaaaggctgattttgtttttctaactatcgtatcaagaccaaaagggttttttttttcatgttcaccaaccctaacccacctcatcaagatctctttggaaagacacaaattattctgtccccctcatcacactccatggcgctgcatctttccacggaggttaagttctaatgccagtacttatggcaaaattacccttgagaagcctgcaaatcagccataaaatggagccgtttacatggttttgtgtgtttagccccaagggaagagcagattcacatttcccaactcgtgttcattgagtggaatggtggatggaatcacttacactttttaaagcctctctctctctctctctcacacacacacacacacacatttttttttctcttggtggagtatatatagttgacttcatataagttaaatgtgacttgtatgtacttatcaaactacatagatgcacgctgttttgatcttccttgagaagataatacaaatcaactgatttcagtatggaaactttacagtgcacacccatccttgcaaacacagaaacccaattttgtcaggaaataaaatttgtcgctacagaatgatctactagacttaataattatctctttggttgtatgtcattcaccaagcttaagttaacccatcctttctgcatttggggacatccctccccttaccagtcccccttgtcccaattatatttcaattttaaagttattttccaaattttaatacaagtatttggtataaaataaggtatagttgctagtccacataatgaagggtatcctttaacctgttctacatcattgatttgattttaattaccatgcatgcaacaaaagtcagctgtgcctcctcagatcagcagagcctgcacacactgctgtgtaacagggttgctacacagggatccaagaaccagccctagaaagggcttagaagcagatcagctcatgtttgcctctccttgcacgacactaagtcttgtttatttctgtgcaaaacagaaacacaggggtgagcatgactgtgttttagaaatggttttgaaagtgctgttgcttattttcatgcatgtctgcgtttgcgctgagatggtccatgtgtgtttcagattgaccctaacagcattgcagccaaggatgggcgcatccgagaaggagaccgcattatccaggtaagtccacttccaaacaatggcctcatgatgggcctatcactaaagaacaaactggttctaatgataggtctagggttgaaaatgcagaagcggttaaagaacagggatcacaaacgcagatgtgtagtgaggccagacaagttaaactaattgtgaggctatctctgagtcataagacgcaagagggagtggtgaggactgggacaaactagatggggcatgttctctccaaagagggccttgcaaaatttgagccagttctccttattttgtttcattctgtttggatcaaaacaaacatcagtgagccaaagtcaggccaacagtttacaacttgtgaactaaaataattctcgttttagatttctctgaaagattaactttggaccaagcatttcagaggctcgtccataaaaggggaacatttttggcaaatttagcagcatcgattgaaaagtcttagaaattttctgactcaacatctaaccatcctggaatcgcttctaagggtcattacttgacctcgagccctgttgctccgtctagtccaaatgagaccattcatgtctcttttggctacaaccttctttaatctcacagaattgaaattcttggcttcattgtgtccacaaggcttagctttctacctcttctcatccgtatcctctcattcttaatccactgtgtttttctcattgcatacctcaccacaggtcattttgattttcttcttccactgcctactctgggtttctctagccttcagccagaacctgtgctgctcaggatcgcttgccctagggaagtgacccaaaccttcacacctgaagggtcagggtcctcagcatactgcctcttttttttttttttttttttttttttgattgctggagttttccattaacctttactactgagaatggaagcactcagaggtactccaaggaatcccctaggttccagacacaatcctccctgcctccactgtgtcacagcaagcccatcttccttggtaattgagggcaatcactccaaccaatagagtcaccccttttgctgcctgttggctcactagtgtaaggaggcatatggaagcctccacttccaattcagtggaaccattgctgtgtcccctggaggcggcgttccaccaggactaagacctccagaccagcagggctcaaagtcaccaggacatgcaagcaaaaatcctgcaagagggttaatcaagtgtgatagtgagagtgtcacgcccacttgaccctccgcctggcccaaagaagtttaagtgtcaaactggggacacaaaacaccatgtataattctattccattttcttaacctcagtttgctgctttttcttctatattatccaataatgtctacatatactcctgcctgaatattatgtctaattgcttccatgttccctctgcagagcattatgatttttctcagtgccgtcttctggaggtccagccccttctgttcacaccccacacatcacagtcacctcatgaactatactcatggaggctcccttatagaccagagaaactgcattggtctgagcaagacctttccttcctaacatcagtattcttttccagctacacggaagttgtatgttctaactgtgagtgggtgacaaatgcaggtctgaaataaaatagaatgattttgcaccatctaatcatgctatttgtctccccactctccccaccccccctttttttttaaaagattaatgggatagaggtgcagaaccgtgaagaggctgtggctcttctaaccagtgaagaaaataaaaacttttcattgctgattgcaaggcctgaactccaggtaaattggcttcctacagatgaaactgggtctatatttctaaaatcaaaagatccccaggcctgcaaaagagcacctgagtattggctgcgaacttgaaggtgctttgttccctggaaatgtaatcaaacttgctgtgattcagaattcactttatgagttagccatttaaggttggttagatgcccaccctggcatctatactgcaggcccacgacgttcattaatgcagggatcatagggaaggaaaaggaaacagaattgaatggaaaacacaaccggggtcacgtcaagacatttgacttcccaaggcctgacatatgttccagccttgatctgtgcaggtttcatttacaatagcagagtatggggaattaaaacttgctctttcaaattaaaagaaacattgaatgataaataattaaaactgatatgaccaccgaataagtgctaggccctccgtggagcactttacacacaggagagccttcccaggagatggaagttcccagagattcaaaagttacccaggaaaggcccagaaggagggtgataaagcagggaggggttcaggcccaagtaatctgattcagaaacctctgtgttgtaataactccttccacaggaggaatcatgaactcacccaggtggcactcttgatccacttagaatggctccagcaacacatctagggcaatccagtagtagatctctttaggtatgtgtattagtccgttttcatgctgctgataaagacatactcgagactgggtaatttataaagaaaaaagaggtttcatggactcacagttccacatggctggggaggcctcacaatcatggtggaaggcaaaaggcacgtcttacgtggcagcagggaagagagatgagaaccaagcaaacggggtttccccttataaaactatcagatctcatgagacttattcactaccatgagaacagtatggggaaaactgcccccatgattcaattatctcccacgaggtccctcgcacaacacgtaggacttatgggagctacaattcaaggtgagatttgggtggggacagccaaaccatatcagtatgaaacccgattgaaaaagccgagagacagacagtggcatacggggcatctgattctccacagatgggagcctcatgagctcaaagggaacttcagcaatcatctcacccacagtcacagactttttcttaaagggccagatagtaaatgtttgacttgggtggccataccatctctgccatgactgctagactgtcactctagtgcaaaagcagccatagacaattatgtcagcgaatgagcatggctgtgttctcattcaactttttttattattatttataaaaataccaggctggattcagcccatgggctatagagtgccaacttctgaatagttcactcttttttgggcaaggcagataaaggcctcttaaaagtgatatccagccaggctcagtggctcacgcctataatcccagcatgttgggaggctgaggcaggaggttcacttgaggtcaggatgaggccagcctggccaacatggtgaaacccaatctctactaaaaataccaaaattagctgggcatagtggcgcattgcctgtaatcccagctactcgggaggcagaggttgcagtgaacctagatcgtgccactgcactccagcctgggagacagagtgagattctgtctcaaaaaaaaaaaaaaaaaaagtgatatcttgcccaagccaaacagctagttactgtatcagaaagaactcttttcacactgaaaatcatttttctatgggacctgttaaactcgtgtctggtccagcaagcaggtggaccagctaaatctacctgaccctcctacacaggtgtcctactgcactgaaggtagctgagatggatgaaagagtttcaccctgaaaaaaaaaaatcatggatattaaagacttccccagatgtagtgtagggttggaggtctgtttaatgtaagggttggatagtttcctgacttaacagcaaatcattgggcagactgcattttgatgactcttggaggaagccctagaaatattttcccccaaggtaatgtcatttttaaaaaaacataaatgaacatgaaaggaaacttctaaggcatgtgttggctgctcttgcctgcagctggatgagggctggatggatgatgacaggaacgactttctggatgacctgcacatggacatgctggaggagcagcaccaccaggccatgcaattcacagctagcgtgctgcagcaggtaacgcccacgcaccagtccctgacactctgccctgctgagctggaggaaaatctgcttcctccatctccctttatggtgctaaagaccatcagaagtccatccacctggaaggcagcaagaaaacagcctcaagtacttttctatttgagcaccagaccagtgaaatgcaagctggtactgtccctagctaagcttttaaatctaagcaacattgccaaagcaaagctgaccttctgataatttgtttggaaaacatatgcgttggcattaccatagattgcaaaaagccatgttttccaaagtaaagcaatcccctctgtttaacaggagctgcttggagctctctagctccctgctatgctactaccattgtcagagtcttaatgagccacttattgagtccttattgagttgaacaaggacctttatacatccttctacctgtgtactgattcatttaacagaatcattgagaatcattcattgagataaagtgactattatcctcattttacaaaactgaggacaagaacaagaataagtgacttgcccaggtagatacgggtaggtgtagctaaggcccacgctattgacgtggtcctactgtcagatgctgtcccttggccttagaaatgtacagcctgccctatccagaaaccgcaaggaaaggtcaaacctgagtacctgctgcgcaggcctccctcactgtgaccctttgttcttgtgtttatgcagaagaagcacgacgaagacggtgggaccacagatacagccaccatcttgtccaaccagcacgagaaggacagcggtgtggggcggaccgacgagagcacccgtaatgacgagagctcggagcaagagaacaatggcgacgacgccaccgcatcctccaacccgctggcggggcagaggaagctcacctgcagccaggacaccttgggcagcggcgacctgcccttcagcaacgagtctttcatttcggccgactgcacggacgccgactacctggggatcccggtggacgagtgcgagcgcttccgcgagctcctggagctcaagtgccaggtgaagagcgccaccccttacggcctgtactaccctagcggccccctggacgccggcaagagtgaccctgagagcgtggacaaggagctggagctgctgaacgaagagctgcgcagcatcgagctggagtgcctgagcatcgtgcgcgcccacaagatgcagcagctcaaggagcagtaccgcgagtcctggatgctgcacaacagcggcttccgcaactacaacaccagcatcgacgtgcgcagacacgagctctcagatatcaccgagctcccggagaaatccgacaaggacagctcgagcgcctacaacacaggcgagagctgccgcagcaccccgctcaccctggagatctcccccgacaactccttgaggagagcggcggagggcatcagctgcccgagcagcgaaggggctgtggggaccacggaagcctacgggccagcctccaagaatctgctctccatcacggaagatcccgaagtgggcacccctacctatagcccgtccctgaaggagctggaccccaaccagcccctggaaagcaaagagcggagagccagcgacgggagccggagccccacgcccagccagaagctgggcagcgcctacctgccctcctatcaccactccccatacaagcacgcgcacatcccggcgcacgcccagcactaccagagctacatgcagctgatccagcagaagtcggccgtggagtacgcgcaaagccagatgagcctggtgagcatgtgcaaggacctgagctctcccaccccgtcggagccgcgcatggagtggaaggtgaagatccgcagcgacgggacgcgctacatcaccaagaggcccgtgcgggaccgcctgctgcgggagcgcgccctgaagatccgggaagagcgcagcggcatgaccaccgacgacgacgcggtgagcgagatgaagatggggcgctactggagcaaggaggagaggaagcagcacctggtgaaggccaaggagcagcggcggcggcgcgagttcatgatgcagagcaggttggattgtctcaaggagcagcaagcagccgatgacaggaaggagatgaacattctcgaactgagccacaaaaagatgatgaagaagaggaataagaaaatcttcgataactggatgacgatccaagaactcttaacccacggcacaaaatccccggacggcactagagtatacaattccttcctatcggtgactactgtataattttcacttctgcattatgtacataaaggagaccactaccactggggtagaaattcctgcctcgttcaatgcggcaagtttttgtatataagataagtacggtcttcatgtttatagtccaaatttgcaaaccctacaactctgggtgtcataggtctattttaagggaagagagagaaaaacacccttactatcttggaaggcaatattaacaaacagagcttttttcaaatagcaattgtacttttctacctgtacccttttacataaagtgtttaaatttcagaaagatcttttattaagcatactttcacagaataacttgtttaaactatattcatataaaaaagttaaacacgctttttttcctgcctaaaacacaaatacaactgccagtatgtatttttaatggaaccctattttataatggtacgttactgaatgtgtttcatatgcgtgaccgttaagatattatcatttaggtgaaggtttcaactcaaaaccacccaacccggtggttaacgatttaatacatataaccaaaccggcagcgtttagagttgggatatacatttaaacattttcctggttaaggttcccaagagagtgtaaaggttttagcagaaagcaaaatatcttgcatctttatggaagtttaaagcatgtttgcaaatattgcagcccattgaaagaatttgcatgtacaggaaagttgtggatggagacggtttgtggaattttaagtgctcattgtagtaaacttttgctttgtagatttgaaggtacagacttatacaggcaagttcacaaaatcatgattagttacaaacagtaaaatgaagttaaaataaattattattttctatttgatatgttttgatgtgattcctcattttgcagtggtgcctataaaataaaagccttttgcagtg
